United States Patent Application Publication US 2013/0096032 A1 - sequence listing, part 41

SEQ ID NO: 1463 - DNA, 81223 bp, Arabidopsis thaliana
gaattcccaagttttacaagtctttgagaagcccctgaagtcttccttatttgcaaaatagaccctacacgtttttagtcgcttatatacctaattttatggtcattgtttaaacctaagcttgttttattttagagatacatttttggagagaagaatccaatcccttcggagaggattctgaactctttttacttttcttcatattattcaatgcaatctatgcagactttgatttgtgctcctttgatcatgtctgagtaatcaccttgttgggtttagggagtctcactaggaatttagatggattagtagatcaaaaataccttaggattattcttaaagttcttcatctataattattcttactgctggttttagattgatcacctagaacttgatcttagataatagatatatccaccataggtatctgtttaagaactattatagatgagcttggtttataggtttgcaataagaatcggcctatctccttaggtgaattattcaaactcgtttagcatgcatgtttaggataaggtttcacagaacgccactgggaatcttagctctaggcatagtgagtttcgcggaacgccaccggttattctgatattagagtttgagttcgagaaatgttcaataacaatcctaataatagctagatctacaatttatctatttcctaagaccattccctagacctgacgctttaatctcctgaatctacaacttaatttactgttttattgtcttttacttttacctactttgtctagcttaatattaatcatcatataagtctattgtgtgaacatcaagagattagtggaattcgaccctaaagtgctaacgacgatcttttatttcagggagtaagctttaggcaatttgagctatatcaaccatccaacgataatagtcatccgcataatgtagtctcgggggatggattgaggtgagatgtgcatggatgcttaaactgttgttggatcttggtggtgggagccaccatccttcccattacaagcatcaccctcctttgcatttagtggtatacaacaagatcgaggaccatgtgctccgaaattcttgataagaggacataagggagttcaattatcatggcataattagtaagtatttttcccattggcgacattgttttctttttatgaaacttttatctatagttctatacttgatcaaagatattcaagcatttataatagagtattcaactacccaaaaagatttgttcttgagatgatggtacttgtgcaagaaaaccaaagtgagtctttattctcgaaaaattagataagcattaagcacaacgttttgttccaaactaagaatctccttagccccagtcaccatctttttttggggagacaaaccttagcccatgaggcttttgatactttccctgcatcaatgtcaccggaccataaatttgcacacatagcttcaattcttttaatgcatcctttatatatagcataaaaatagacatccagaagttaatagacccatatatcactgatgctatgaattgaacctctttacaaatttttagctttctccacataattggtaatcccaagtatcaaatagggagaaagccaatagggaactatactttgcaatagcagtgaattcacattggttcaatctgccagatagaagtttgttttattcttattgacctggaattaagaccaagaagcaaaatcttttggaacttcactttttacatgtagagaagaactacgatcgtcgtaaaaaccataacgccgtttacaaacattaaatgggagattgagagctcttgcatttttagatgatagtggatataaccagcttgaaacctatagtgcaacaaggtaggaacacctccatagccagcataaagaggtagggagataacaggtcatcctaccttaaaccgtgtgtgctttgaaaaaaatctcatgtgatctcatttacaaagactagaaaagttagagtttaaatgcactattggatacaatttatgaatacttttgggattaagaatttttagtgccactatgacaaagtcccatctagcataatcaaagctttcataaggtatacttttgaaatacatatagactcaatattattgtagttgtaaccttaaactctctgttgccatgttaaattacatgagcaagcaaattttgaaggatgtcaaaagctttgcaatatatgactttgtaaagagtgttcaaacaagaaattggaatgaaatatgaagttcttgatgcgttaccgatcttggtgataagcactagagtgcaacattatatttcttcaataaggtactagataaccactagagtggtggctgttcttgctagacaagaaaactttttagacttggttgttgatattgcaaatgaatgattataaatgggaaaagtcagtgattaatctttaagaaaggaactataatcttaaatagtttatcaacatttccagtaactactaaacaaaacatatgctacacaagattgttgagcagaagaaaaatgaaacgtcccattccggactgtaagtccgacaaggttgtttccatacgaaaataacttaagtattcttgggacttaactgtattccttctaagtgaaattggctgcgaatattctgagattcataagtaaaaagagacgaatacacattagtaaataaacaaacgaaattcattcatagatataaggtttcaaacgacatgaaagtttgcactttaggctattacaatcattcgatccaataatttaatttaaacaccatccacttccccagacaactatcattgccgctaagccaaattttcccacgaacttggttgtctcctaaaatcaacaaaagataagattgcagtggtttacacttagcgatcatgcatatgctaggatgctccccatgtttactcccacacatatcatatatcgctcacacattaattataacatagataagtcgcataaaccgaattccctagccattctcaagatcatctgatctaaggctggtacgattatgcatcaccttggtcgtacgacagtagtctcctagggctgccccggatccgttgatccagttcactcgcccctttagacataatcgtattatcctctcaatttctcttttaaatgtcgctggaattttgtgtttgttgtgtgtgttttccgaaattgtaacccaaggtgtcgcatatataggcgttggggtaagaaaaccgctgacaaccgcccttatgaacgaatggctgtgaattcccattgcttctgtccatacatgtgtcgcccatttgtggtcgggtaactgtcggggtaaccggtgggataaccgctcgggtaaccgccggagtaactatcggggtaactgtaggggtaactgatgaggtaaccgcgtcactacccattcaactcggttgagctagcgcagctagctgacacttccattagctgatccagctaccctccaagcatgtcgagcttcccatgagctgtcctagcttccccttagcttctcgagctcccctttcttagttttgcttcctttttaccttgggttattgggttttcgtgcatttcagcgacatagccaacccttttggaccatgggacgagtattctcatttcctctctcccaatcttctttatgctcgtcctgggttcctttccctcgatcctagtttggatcggggatgttgcagaaatagacacataattgaatatattattaactttgaaaggtcttgtaacttatataagaggtcaaagtgtgatttactaatcgagagatcaattagtaacatatttcaaaaacttcacatcctatgctacttttacaaagtggtgaggtcgctcttcttttccaaaaattgcttaataaagatatgaaccatctcttaatttcatatatatgtacatagattacatatatctattaagaatttgttcaagaggtcatgaaaatatcatagtaaaagccttatatatgctactgatatgcaaggtgtaccatttgaggcttgccttaagttgccatgtgattatgtgggtggtgtcacaagtgtaaagaggagagaggtatcatgcaacctgttatagcgggtctagacggtccaccaacacatatcaccctacagcatatcaaagatggatttgattctaacgattggaagtttccgataaatcgtgatttggttctaactgcagatttagaagacatcttttttgatctgcataaatataaaaaatttaactttatttcgaaatttaccgtaggtttataaaattcttgatgaccttaaaagcaaacatcatgtggattttgaaacaataaggagaatttgtcaaaatacctttttatgcctttttgcaaaaataccctattttattgtcgattttaaaaatatctcgtttcatgaataaataactaaattactcttcttctaatgagaaaacgtaatgaaattgaaatttcttgccaaaatttatttttccgccaaataattgtttttcctctaaaccaatttttctaacggctatctgccaaaaacatttcctccaaaatttgtatttaaaatattttgtaaattttattataaccatttttaaacccttgtaaatcttttaaaaactcttaaaatgtccttgtaaagttttttaaaatcttttaaaacctttgttaagttgcttaaaatacttgtaaatcatgttaaaacatctttaaattcttattaagtctataaatacacatgtaatactttaaaaacctttggaaatattttaaagggtaaattgcaagaataacgcttttggaagatgaaataaagaatatagcaccataaaatgcacaatgtaatgagtaacacttgagtgtattaaaaaaacaacaaactccttgcaacttgtcagtgaagagatggtaggcgcgttgggatgttaatatgggcttataacttagggtcggcccgagtccgttaaaaaaaatgtaagccctaaccctgataaaattaaataaaagatttcgggctaagatagggctatactcaaattgttatgggctaaaatagggttggcctaaggcgcgtggagcaacaaaagaaatgatcaaaatatatccaccctttttaatcttgtttactatgttagtttaacaatattatttggttaaagttaataatattattaaaaaaaacagattttttttttgtttatttaacatgatttggattttaaaaatcagaaacgaatttttcagagatgaatagtggtaccaagttctatacatatcatcatagaaaaatagaatagtatatatttgttcaaaccaaaacgtttgttcggatgaatccaaataatcaattaaatactttttgatggaaggatactaaaccctaagggtataatatatagggaacccaaaggttttaatctaaaacaatgaccaaatcacttaatatccataatcaaatcaaacaattagtatattcacaaaatagaattgtacaatagaataccatctctaacaaatctcccaaacccaaaatgactaataggaaatctccgatggagttttgttaatcatatttatcacgagaaattttccaactaattaatccatttttttatgattcacttttgtaaactaatttcttcattggcatcaaatttgataacttctaaatttccaatggagtttttaattgcttataattagagaaaattaaaccctaagttagtgtataaggaacccaagcaacaaattttatagattttatgatgaatttttggttttaatttgtgaaataaatgaaattatcattaatgatgagattctagtgaaaatgtttgtacattatgaaataacatggagaaatgcagaggaagattgaagacaatatgttggctagaacattctaattatagaggagacatatgagagctcctatagaagttgtaagagagagagaaaatggaggaggtggagagagaggaagaaaaaaaaactcgtgaatttgtgtaatatggattaaagacacaattacctccaaaacatcgtataagagttccatatgatatattgtgtgtaatatgtattcctataagatgctttgggggtaattctgttttaatacatattacacacaatatatcatatggatttgtttctttggttagtttattaaatatagttttttgttggttatatttccaagtttccttattttaaaatcgttgtaaatcttttaatactattgtaaacaatttttaaaggatttacaagaattttaaaatctttagaaattcttttaaaattcttttaaaactcttataaagtcctttaaaaaatttgtaaattatttttcaactcctaaaaaattgtaaatatttgaaaacatttttaagtctttttaaatcattttaaaactcctttgagacctccttataaaaggtgtaaaaaagatctacaatagttcttaaaggattttaaaagagattacaaaggttttaaatctatatcccgcaaaaaacaaatgtttttaggagaaattatttttcgaaaaaagaatttggtgggaattattttttgactggaaaattatcgtggaaatatttttggcgggaaaaatcactatttcattttgtaacctaaaatattttcaaataatggtaaaatggtcattaaattaaaagagggtacaaataaaaacaaactatataaaagggtatatttaaaaatgggtagctaaggtcatctttaataatttctcaataataaaaacaaaattaaaatataaaaaattacattcaaatttcaaactaataatacttctaaaccgaacttttctctctcttctctctctagaattttttagagagagaaagctcttcattttgttttttgacaaagttattgtcggattttgttttccggctaagtctggctttgtattttcacctacgtgtgagtctataccctctatggctattttctctagtttgtttagttttgtcttctgcaattgcagatcttaaatttcttctatcgaaggggaagtagaagccgagagtttattcagattttctggaagcatcagctgctcgattctagtcaaaatgggaatgaatccttcataccccctactgggaccgtaatcggctaaggatgaaggtatctctttatgatcgtgaattgtgttgagtgggattcggtggttctggcgccggttctggcgcttcattaatctaatgctttagatctgacctctcgccatatcgcgggttatggcgctacattaatctgatagttcagatttctgtttgtttactctcagatggttgaacaaaaggtgatgaaatggtgataggaaatagtaactgaattctagcaaaatctttgggcaaaaaaaaactgatccgcttggcgtacaacggtggatttggtcggcattcctgatcggtggagatggcggagctgatgaatgagtcggttgcgttttttctgccctccgtcatgtgtgcctccacgtgtacacacatgttcatttttgacccaacttgctcttactttgtaatcaatatatgggttaattgggcattaatattgtgtatgtgggcttattttcaccatgtaatcctttaaggatttaatgaaattgacgagaaaataaaataaaataatacttctaaaccaattaaaatcctatgtgaaatccaatctttataattaaaatccaattaaaattttataacaatgtgggtattttaaccgaactgaaccgaaccgaaccgaccaaactaaacttaaacctacccaaactaaacctaagcttagattcaaaccatttggttatgtttcatctcaaccaaaatggttcggttcggttcggttttaaactgaaccgaaccgacaacccaatgtgtttatttaattaattaattaataatattgtacattactaaatatttaattatttgcacttttaatttcttttcatggtttatttgaattagtaaacttaaatttacagcttgaacttgttgattgagttaactattttaaacgacaatgaacgaattttttttgtttcgttacattgataagtcttttaaaatcgaattaaaagcaaatcgaactaaaccccaatcgaaccatagattaattcaaacacaaaccaaaccatattaacttcggttgagtttgattagagttttaccaaacccaaataaaccaaaccaatccgaattcaaaccaaacccgaagtgaaactagaacgccagtaaacaatattcaaatagtataaattaatacaaaaaataaacatgacacaaaaaaattacaacataattgttatgtttggtttccaaataaataaaagtaggtggcgggaaaagaagaatatcagaatatgcgttaaaccaaaccggtttaaatccggttcaaaatctttaattttcccaagtctcttatctcttatcgacgaagatgataaggtaacaacaaccaccatcatcgtctccactctctcatcaccaccatgctttctctaactgcaacaactctcagttcctccattttcacacaatccaaaacccatggattcttcaatacccgacccgtttaccgaaaacccttcaccaccatcacctccgctttaatccccgcttcaaaccgtcaagctccaccaaaacaacaactctatcaaccattccgtccaccaccatcaccaatccctccaaagttccgatcactcgacaccgccggaaaaatcgaagtcctcgctgatcgtctcggtctctggttcgaatacgctccactcatttcctccttatacactgaaggattcactcctccatcaatcgaagaactcaccggaatctccggtgtcgaacagaacagtctcatcgtcggcgcgcaagttcgagactctttagttcaatccggtgccaaaccggagcttatagctgcgtttgacacaaatggagccgagcttctctacgagattcgtcttttaaacacaactcaacgtgtagctgctgctgaatacattgttgatcacggtttcgatacgaaaggagctggagatcttgcgagagcgattaaagattttccgcatcgtcgtggcgacgttggtttgggagactttgattataacttacctggagattgtttgtcttttatgctttataggaaaagtagagagcatcggagtccgtcggagattcgaactacattactcgaacaagctcttgaaaccgcggtaacagagaaggcgaaaaaggcggtgttgagggagttacatggagagagtgaagaagagagagttaaagaagaggagataaaaatcattcgtgttcctgtagtgagattaaggtttggagaagtagcgggagcgagttcggttgttgttttaccggtttgtaaagcagaagaaggagaagagaagcttcttgaagcaccaatggagtttgaaagtggaggagagtttggtgtagtggaagctgagaaagattggagtagatgggtggttttaccgggttgggatcccgtggttgcggttaggaaaggagtggcggtttcgtttagcgatgatagggaagttttgccgtggaacgggaaaggagaggcgataatggttgtgatcgatagggaaaagaagacggtggaagctgataatggatactactaccttgttgtggctgatggtgggatgaagttggatagaggattggtgttgaaggagaaaggagtgaatgagagcttaggaatggttgttttggtcgttaggccgccgagagatgatgatgatgagtggcagataaatgatgaagattgggattagaattcaattagaagaatagttaaacaaatacttatatgcttttggttttggcaaatatgtaatttttttgtttgattgctttttatctcataaatgtttctttcattgttgtgtttagtgtctagctacatcaagattctcaccgtagtttttagttgaactatgttttgtgtagttaaagaacattgtataaggactaggggatgatgatgagattgcagcttataaaagcctattcggtaacaatgcaataaacaaaatattgtacatatggtctgatctaactttttttttattatgtttagaggttagtcagtattttctttaactatcatttttgaaatactctttttgtaaagggtgatttagctgaataaccatatttgataaacaaattaagaatatagcaccatatgtataaaaattaagaaaatagcatgtaaggataaggaaaagataattttagtgttgaattggaggtgagataatttagtaacacttagtttagtttttcacctatttgttttttttttgctatatatcttttccaaaaaatagattctaattataaaatttattagaaaaaaccctatgtttttttctacatacaaaatagtttgaatttttaaaatcggatttaaatttataaaatagtaaatagtgtttgtaagtaaaaacatgtattattttggatagaaataaaatgttatactatactattttggatgtttagaaaaactataccctaagatacaaccttggcaacccaagcaaccagataacataagtggtatctgaaaaatctactttgtccttctcgtttgtttgttatgtgatacaaaaaaaaaaaaaagattgagagaagaaagaaaaagagacgagagagtgaggagagaatgagggacttagaatgaggtggagaaaaatgggtaaatatgtcattgttttttttgtcttgtattactttcttaatttataagtttttgttagttattcttgcaaatttcccttttgtaaactatatttttttgtttgctttagttttttcttgtagttatagaatgcaattattcttcacgttttgaagatatgtaaaacatttatccatttccaatgttgcttttttttttttttttttttttgaaatccaggaggttctgggccgaagcccgtaatcctcccagacccgaaaccacatcatgtaatattagtttcgtcccaagcgtcactcgaaccgatgacctctaagcttcgtctagagtctttaccaattgagctaacgacatttggttctaatgttgcttttgagagagattgcaaggagttgattaaaattttggatattctggatgagtggtggcatttgcttcagaattagaagatttcactattttaatccttggttttcctcatttctctttatcttttattccacttttaaacaatgtccgtacagattctctcgatggaatacaagatcacgtgattctatatttttccatttaaactcttttacaccagactggttttctttagaacaaaactgtcggtttctatcttaattggacgattatattttgcttttaaaaaaaataacatctaccgcaacatttaaaaaaggttaagttatttataatcaaagccttctttatcttgtcaaatcagtgatcacgtagacatcgagaaatgaaaaacaacacttttattattataagcaagacctagtggatcttgtttagccacatactaaaacataagaagaaacattgaatcgaaatcaaatcctacaaacatagggcaaagctaatcttgatcacggaaagacgaacatttattattctaaccaagacctaatgaatcttggtcagtcacatactaagcataagaaataaacatctaaacgaaaccaaatcgtccaaatatagctcaaagctcatccttcttgatagcggatggacgaactccctcactaaggaattctctataatacttgcccgaaactttctcatgacgtgtgaggttgtttttgtaatcaatgtaatacagtccaaatctgtttttaaaaccatcttgccactcaaagttatccatcaatgaccatacaaaatatcctgtaacatttaccttgtcttcgctgcagattttatacatttattttattactttagatttttatttcaattgttactccacaatatcagaaaaaatatcacttaccaaatagctttgtgcatactccaaagatgcttcttaagataactttccctgttgtaatcagcagtaccattttcaaccgaatcgttctctttaaggttttctccatatcctaagaaaataacatcaagattaaagaaaatataaactgtttttaataaagtaaaatcagacccaaaaaaatatatttggttaccgttttccatgatgataatttcaggatttgcgtatttatctttgacgtatttcaaaacttttctaaagcctgtagaataaactggcaatggaccggtttcaggctgaaataccaacaaagccgaaatgtttacatcatagacagaattataatatttatctaatagcgttgttgtttactctaattcaaattcataccttgctaccaatagtgatattgtttacatttttatctgtaaagatgatatagtatttaattagtaccaaagacaaaaaaaatcatttgcattttcaggtaaatatgttaaaaagaaaaacttacttttccattcaacaagagaatcttgtttaaattttggttctgcatggtttggcttctccaagtgttttgaaaatgtagaagtatagtaattgatccctacgaaatcggctgagtttttgagttttgctatctgctcagtagtaaatttaggcaatctatgtccaacaatgtctttcattgtctgtggataatccccaaacatagttgtgtccagatgcctgaaaagaaaaattccattatattcagatttcattttctttaaaatatttcagtcttattaactacttaccatcccattataaagtcaagtgcacggtcaatggtcgcaccactttgttcatctttaaagtcatgtggttcaaaccaagccggactatgtgcgattccgatctttccacccttacactgtcgccataaacatatcacaaaagaccatgaatagctaagatttatgcaaaaaaatgattttatgtatggagtatgtactttttcacattgtcgaaaagcttcaacggcttctgcatgagcgttgaggaggttgtgactgactagataagcctcataacctgatcgtccgcctagacaatctcccttgacagtttcgtccttggcgtaaggagaacaacgtccaggtgctttctttccaacgtcataaccggcatgcgcgaaaacccatggctcgttaaaagtgatccaatgtttaacttttccaccatattctttgaaaacaaactcagcatactcccgaaaatctttcctgttttggcaaaaggatattgcattaatttaaatcacgttgtgtgattgtgaattaaatttcatgttcttccaagtcaaaataaattgaccaaaaatggatttattcatctcacttatatatatacaagtgttcaaacttcccatgggatcccaacatgttgctataaatgaaatattatggaaactcacacaatgtgtgcgcttaagaagcccccatattcattctctagagtttgtggcgtgtcccaatgaaaaacagtcacgaacggaattatacctaaataaagtattatacaaaatgatttttttagagaatatacataaaggtaatatgtatatgtttttctttccttaatttttattatttatatgatttatattaccgtttcttttgagctcgtcaatgaggtcatggtagaattgaacaccagatttactcactccattctcttctctcccgtctgataagccattatatattgtttcattaatatttcaaatgattataaaatagatttaaatataccaaaccttattcacactaaatcaatctggaagcacatttactcacgaggaaaaattcttgtccatgagatagataatctgaaggaatctgtgtttagattcttcattaattgaatatcttcctacaaatatattacagaaaagaaaaaaatgcaacatcatgtgttagtagactcattaatgggatatagttttaaatttagaagatatacgtgatgaatattgtcatgttttctaatggaaaatcttgtaatatgttatgaaaaacatgtcaggtttcaagaagatgatgagaatcaacataatttagacatgtaaacaacttttctattattgtttgtcaagtaaaatgtaagggattttctttatataccttgtaacgatagaagaaatcaacagcttgagtaccattatcgccattgcatttttctgtaatttataatgaatttagaaactcatgttgataaaaaaattcaacatgaacatcaattattttaagagaaaatataaataaacttgaaaacgaaaagtaaatgtagagacactcacctggatattttttacaatagatatcccatacggatggtccacgacaagtttcattcactgcaccttcaacctaatgacataataaaatagttgatgggtttggcaaatattcgcaccattgacctcaagtcgtagatataacatttgagctataatattacatgttgtacctgatatgccgcagtcgctgtgccaaataaaaaacctttaggaaaatgtgcccggcttagtttgtccgacggtttcggtgggcaaacaggtccatcggcatttaccagcggacctacgatgattagtagccaaagcagcccaatagacatgagaggaagtttttgcaataccattatgaagtttttgttttgtttgtcttcttcaatagaaaagtttaggatggctcttttacatctaagtaaaggtctttatatagagattatgattcatcgattagtctcatattatgttctttttttaatgtgccaactgccaaccagttctctttaatcatgtttagatttatttagtaaacttattttatgtatatgattgatgattcatgaatccactatagtacagtgttatttactgattgttttaaaaaatttggaacatcagtgtctaatgtgcaacgtatattaaaatcttactttgaataactcgttggcataaaatatttctcgtgttttttttttggtcatatatttctcgtgtttaacgagcaaacaatattagtatgtaatataggcttgaatgtaaatctaaacaaaatataaaattgcaatcttgaattataactcccaaaatgaaacttcatgtgacaggagtctaaaacattaattgcttcatgttcattatatatctttcagctagatgaaagccaaaatggtcttgcctaatgactttcgtttgtttattttagctattatgaaccaacaatatctattgtttttttcttttgtttgttgggttcaactttatattgaaagtctctatttgtttgttggacaagaaaatctataagtattcaacacttgtattggaggcagttcgtgaattatacgggaaaaggtgttttaatgttccatttcctaaacattagaattttagttaaaggtacaatcttgtactcggtcatcaggtacattttctcttagatatagtctttggtattaggtatgtgtttgatcctcaatgttgatgggctagagcgatatggttgtttagaagttttgtgggttttggttttatagttttaatttgattagaatatcattgcttttatgattatattttccttatttttgttggactagataaactcaaatcatgtggtgttttttcataaatactgtgaaaatttaatgagaaaggtgatgagatttaactaccaaatagaaactatgtgttgattattctatagctcttgattgggacctattaaatatttgggtttcctcaaatacattttttaaggtatagcgtttggtataacttcacagaggagtgaattcagtttgctgatacgtgttgagttctctctttacgttagtggatttcagcttagttagatggtgttgaattcactctccaaaaataagtgaattaatttctagaatttaagggttgagttttctcgtcacaaaagttaatttccgttctctcaaatagtgttgaattcaccctccacagagaagtgaattaatttcgttgataattaagtattgagctctctgtacacagaagtggattagctctctcaaaatggtgttgagttcactctctattgagttctctcttcatagaaatggattttagctttctcaaatgatcttgagtgtactctccacagagaagtgaatccagttcactaacatgaaagtgttgatttctctcttcacgtaagtagatttcagctatctccaattgtattgagttcactttccacaaataagtgaattagtattctctatagttcccacttcacaaacttataattcaactctcaacacaggtttgagtcctctcatcacagaaaaatggaatcagcttgttgaaatttaagttgcgatctcacatcacatctaacccaagctattatctcacacctaagcagggatcttatcttgcatctaagatgagatttaatctcgtatctaagctgaggtcttttctcgcccaaaattaatttatatttcaattctcaaactatcaaaggcctcaaaatcacatcgcttaagcttagctcatgcatgtaagtcgaatttacctcgccaatttttaacttgaactttgttcataacataaaccaagtttttattgcaagtgtttaaatctgaactcatccaacaacacatttatgataatattagttctccgagaaaatcaatattctcaaagaattgtagggaatacttgttgttgatcgcaatcttttatcttgtgaatcaaatctagcggaaatttacattcacattagaattgaattaattgagctacccgtttattgctaaatgggatctaaacaagccgaaattgcttgcggaaaatgtccatatatattaatgattttgatttttcattttaaaattttttaaaagttcacccctaaatagaattaggttgcttttttttctttcttacgaacgacaagtagataaacctttataggcttgaggctttaaacccatttttgacttaagcggtacgtgtcaattatgtgtggtgtgatacattacttacctactgttgtctctttcgtgtttgtgtttccaatatgaatcaaagtataattgtttagtaaacttatttttgtatttaggatgattcatgcactatatgatttagttacctgtgagttagttacttaatttccaaaaatttggaacgtgagtcacatgtcaaaattctaatgagcaagagcaacatatattcttaaatgtgactttgttagtggtgcgtgcatgattcatgaatcatcctacgttttagaaaatagtaaactaatagagatttcaatacgtgtgaaagtaaaataaatatataaatgcaaatgtagggtttgccaaaaagagagctttcatatctatcccaacatataataaagtatattttcctctttcgtttcacttcaatcaaagttttttttttagcaagtgcaaagagaacacgaaccatatttatttgttcacacaaaacaggttcatttggtccttaaaagtagtaactaactaatagtaccgccataatcgtttccaccaaattacaaacttttatggaagcccatgcaagactaatcttctatggtttcaaccgttggaccgagtgtcatgtgttatactaatcaaaacatattaagactctttaatgtagctacgaattttgcatagacaaagaaattgaaaagcttgacttttccagtttggccaaaacttcaatcacagatttatgtaacaccaacctgacatcatatattactactggaaatatattatgaaggttatagatacataatgccaatttgctttagaattagcagttgtggtgcatcccacaccaatcgtaaccgatataaaggctaacagactgataatcttactcgatcaagtttactgaaaaaagaaaggaaaaaggtattttaaatttggcaactttggaaactctagaggcaaatacgcagtttacaagtttagaaaacacatcgtgattgagcaaagagaaactacttcttctctaactatatatgatgtaaagccttgtagcataattggcaatatatgattgaatattaactaagcaatgtatttcaaactaataagagttgacggtagaacgtatagtgaacaaaatgaacttgctttgtctgaagtggaaatttaacgagaaaactacaaatcaaagtttagtagctgtgaagctttgtagcatcattggcaatatatgaatgaatattaactaagaaatgtatttcaaattaatgagagttgacgctagaacgtatagtgaacaaaatgaacttgttttgtttgatagtgcaaatttaatgagaaaattacaaattaaagtttagtagctgtgaatccttgtagcatcattggcatcatatatatgaatgattattaaattagcaatgtatttcagactaatgagagttgacgctagaacgtataatgaacaaaatgaacttgttttgtttgatagagcaaatttaacgaggaaattacaaattaaagtttagtagtcgaggtccataactttagtacttgaaacacaagagaccaaacgaaaaagaaacacatgagtaggtgaagtaaaagaaatgtcgagatttaaatctacacctagtctaattgtgaattactaaaatgaacttcggcaacaacgccaaatttgatatagctcaaattttctttaagcttactccctcaaataagagatcgtgggtcgaatttcactaaactctcgatgttaacacaataaaccaatgatgattgataaagataaacgaaatagacctaattactttaggaatagatcctatcttttagcacaagacagacatcttatttaaaggatcagaagaaaacttgaagtacccttgatggattttcatggacccgaatctttacttggtctgttgcgcctaggggatccttgatggattttcaaacacaaatactcggttctcatacaagagatttttcacattgtataatggtcgatcacatacatggcacagaaatactaaatttatcatgcattcaacaccaccaaattacacacgcaagttacacagattatacatgtactaggttcaaccttaggtcttacaaacaatatttcacaactttttgtagccttagcatatttacacacaaaattgctatgacttggctgattaaaaagttaactatatttctttctagataatcttaacggatcatcggtatagatttccttacacttagaatactcgcatcttacccactaaaagtttctcaaatatttattatactttggccatataagaatgattttgattttttattttaaaatttaaaagaagttgacccctaaatagaattaggttgcttttttgttttttatgaacgacaagtcgataatctataggctcgtggcattaaaccaattttttacttaagcggtatgtgtcaagtggtgattggtgtgatacattacttacctacagttgtctctttcgtttttgtgtttccaagatgaatcaaagtataattgtttaataaacttatttttgtatctaggatgattcatgcactatatggtttagttacttgtgagttagctagttacttagttttcaaaatttggaacatgagtcacatgtcgaaattctaatgatcaagagcaatatatattcttaaatgtgactttgatagtggtgcatgattcatgaatcatcctacattttagaatatagtaaactaatagagatttcaatacgtgtaaagtaaaataaatatataaattcaaatgtagggttcgccaataagagagctttcatataaatcccaacatataataaagtatatttttctctttggtttcacttcaatcaaagtttacttgttcacacaaaacaagtttatttggtcctcaaaagtagtaactaactaatagtaccacgatgatcgtttacaccaaattacaattttttatagaaacccatgcaagactaatcttctatcaatggtttcaagttttcaaccgtggaccgagcgtcatgtgttatactaatcaaaacatattaaaacacttcgcctttgtaatatagctacgacttttgcattgacaaagaaatcgaaaagcttgacttttccattgtgaggaataagatctctagcttttagccaagtggtacataataacatcgtactttcgtccactttttagatgcttttattacgtttcccattaagaattcaagagaaaatttaaattgttttaactctatgtaaatctagaaaagtcaaaattattatggagaaagaataaactcattatggtctcccaaactgattttacaaccgattaaatgaagattgtccgataccggtaacaaggagttggccgacggtgaagcccttcttgagaccgatcacagcctacgtgaccgatgtggtgccttattcagagttcagtcatgaagctcgtacacggtatgaagcccctcgtccctgcacttaaatgaaactatgtagttttgcccaaaaaaccccaaattgatattctacttccctaaacctttaaacacttgttgtaaacccaggaagagggtgtgatctccgtttgaactcacaaagaagctgaagaagaagcctagagacgcatcagccatcctctatcttgatccaaagttttgaagacaccaaatcccttcgtttctcttcttttactaagatctatatgttaagtttttaccttttgtattcgacaattaaaaataaaagtaatctctaaaccttgttcagttcatattcatcttattcttatgagtctattaaactttgctttgatgaatcccttagccatgctagagtagtttttttagttgggtttaaaagggaattaaaagagggacaagaccgagtgttaggtggcaatatctagggttttgtttgatcgtttacactgtcatctttctagctaagatttctcttaatgcatgtagttagcctcatgaacggaaagtcggctgttttatacccaacctaaccatcagtgctgaattcatacctaaacattttctatgtgctaatacatacccaagttctgaaaacattcaaacttcatacccgaatttacaagaacgtgtgaaattatacatggctgctaacgtggatgccacttccttgtattgttgttaaaacgtgtgaaattatacatcttgtaaaccgagatttatattttcactagggtcgacccaaaaaaaaaaatgtcatgtggaatgttgttaatttagttaaactgatcttatcatatttaatgtatggtttttaaacggttgtatttctagtcatcatggacctaattatttaggtatgtctgggcatttgggtattcgggtcgggttcgggttttccgggtttgggcatttccaatttagaaatctaagatctgaacccaaaattttgtaccaaaacatatttaaattacttaaaaatacacaaaaaaattctaaaaacacttgagtattttactatctcatctatcaaaaagtagataaagtacccaacaatatacaaaatatcttaaaataaaaatattttaggcacttaaatttttgtaaatatgattattactaataaattatttctatgtatatatattttggatatgttggggtacttgatcgggaccgggttcgggttttgaagtgtaggatccgttcggatattttaaaattttgggttcagatcgaatcgggtatttcaggtcgaattcggttcggttatttggattcggatattttgcctaaacctaattttagtaatagatcctagcctttgtctcaagacagacctcttgtttaaaggatcggaagaaaacttgaagtagctccttctatttcgttggagacaatctcattattatcattttaaatgtgaactatgattaagttgtactatatagccatgaaaaatgtttagttataatctaaaaaccttttttcctttaaaatgtgttaatcactttttatgatgttaatctggtatgattttatacatgtctttttcatttctgtctacatggttctgaattgaaaagcaggtaatagtaagaccatccttattacaagtctcttactataagtcttaagtataatataattaaaataatatgtgaatagtttagaagtgtttcttaggtaagagataaaataaggtttaagagcttcaaatcattacaaaaactcttagctataatgtttttcaataaaacaattcatcataatagttaaaaggctaccattaaggttcctctaatggctcttgtgagttcgtgatatacatcagtgtttcaatgtttttttccgtttttaaatgtaaccataaactaattttaagttctgatggtacgttttttttggttttttgcttcttttaaccaaatgttgtaaaagcatcttagaaatgataagggataacacgtctcgctatcttaataaatcttgtgtcttcagcttatagatgttaaattagaaataaaaataatattaagaaactaagtttctaaatgattagaaaactaagtttttaaatgattagaaaactaaaactgagtcgaacaaccaatctgcagatggggaaaggggtttggttctcggaagcaacaccaaaattttccttcatcacttggcttgcaatgcatgatagactaacaacgggtgcaagaatgagaacgtggaacacacaagtggatattacctacaaattttgtgcggaactggtaagacaaaaatcacctttttcagtgtccttattcaaaacatgtgtgggagaagctcacgaaaggcctacttcaaaatcattacactttttatttggaccgcattgtttcgttcctcacaggttcatttgttgggaggaaaccacttctgcttctgaaatacacgcttcagatcacggtacacaccatatggagagaaaggaacaatcgaagataaggagaggaggaccctatcacaattgtggccattgggaaaaacattcacaaaaacattcacaaccagatcactcttcttcagaaaaaaggaaacccaaattatgatgacttatttttattttggctttctactaagttttaattgacttatttaagacaaagtatgagcttaacaactcaaacaagatgtacttgatgtaaccctgatttttttggtgaataaattttgcattcattttaaaaaagaaaactaaaactgagacacaaccaccagattattctattcatcactttactcccaactctcattatctctcccaactctacccacaaagggtatgttttatttctcaatcttatcttcattctgtttacattatataataatattaggaggaaaaaaaagggacacgtaatacttctacaatgtaccaactggcaggtaactcccactaaaacaacttaccatatattttataatgccttgtttaccacgagtaatgttattaaaaatactgatttctaggtacttaggaaactaaatgggtgtataaaaagccacattcaccacctgcttattcatcacactacaccgttcattgtctctctcaacttcaaccacaaaaggtactctctctttctcacatggttaaggtataaactaataatgatcttgatgaatgactttggaagttaatatattactctttcatagaaaatcaaaacagttcgtgatggctcagaagttagaagcaataggtagaggcctccagtgggatgattcatctgaccatgacaatgtaacaaagattcttgtacgaggtggtcgtgaaggcattcagtacgtcaagtttgattatgtcaagagtgggcaaccccaaactggattaatccatggtctctcgggtagaggaggattcacacaaacggtatacatgtcttataaaatataatactattattcattaactagtaagcaattattattattattattaattatattaacattttgttatcaccatattacagtttgagattgatcaaaaggatgaacatctagtatctgttgagggctactatgatgtcactaagggtgtgatccaagcacttaaattcaaaaccaacaagaagacttcggagatgataggatacgatgacacgggtattaagctttcacttgaagtcaagggtaaaaagataattggcttccatggatatgccgagactaacttaaactctcttggagcttattttacaacgactggtcctattggattgaacccccaagttggtcatattaaattggcctatcaaggtggtggcggagggatcccttgggatcatggtcctaatcacaacggtgtgaaaagggttagctttatctttgatgaaaacgagataaggcaatggagggtcgactatgacgatggtggagtgataagacaatatgagccgatcaatggatatgatatggtatctaaatattctctctctctctctctctctctatatatatatatatatatatatatatatatatatatatatatatatggtcttgattatgcttatatgacgccattttctacttaagtttgaggtcaaagaatatccaactgaatacatcatatcggtggagtgtacctacgatgatgtaatacctagaagtggcaggcgtatgatcaggtcaataatgttcaaaacttcaaaagggagagtctctccgatatttggataccctgctgctcgcaaatttgtgctcgaaaacaacggtggtgctcttatcggcttccatggaagagttggtgctggtatagatgccctcggagcttatttctcttcgtttattccttctccgcctcctccttcccccgaaaaactacaaccagaaggtggtgaggcagtaggagatccatgggacgatggtattttcaatggtgtgagagagatacatctagaagacggtgagggtatcgccctcaagtttgtgtacgataaggacgtccaggtgactgaactgaaagttcatggggaaccatcaggaataggattcaatgaggtgattatatattcattcacgtatttactttaaatttgtattaccaaatgcttttccttgacctagagtaacatatgtatcggctaaagattcagagcttccttgttacaattgttctttatgatcaaccactttacttattctccatgttttgcagttcaagctagattatccgagtgaatacatcactacggtggaaggtttttgggacaaaacaagtggaaatgaacgcggagttataaccaggcttcggttcacgaccaacaaacaaacctttcgaccggttggattggagtcgacaacaagcttcagtctcgggaaggaaggttacaagattgtagggttccacggaaattctagtactgacaagcttcaccagcttggggtctatgtcgtgcccatcacgcgcgagtgatctttgcctaatcttaaatgagctacttctcagatcaatgcttgatcaggttgtcttatgcttttcatgtttctgccatgtttaattttataagttattgtcttctatgtttgttgccttattggtgtgtcgttcagttatgaaatgtcatgtaataagaacgcttgcgtcattttctatcaaatgatttaccccgtcataaataactcgttgaactcatatatatatatttcttacttataatttagtttaactatttatgaactcatgtagtgtgaaacattaaaaagtttttattggtagaaagatttttagtgaatatctaattaagattttaattagcattttcaaagttaaaaatataaagcaagtaaaccaaaataattcttgttaattttcgtaaagtatttttcaaattaatattttactatttttgtaaaaatctttgtcggaacggattgaagatgaagtcatctggttgggaaaacggtgtcctcggcgattggacgtgagggtatgatttgttacatttccttgccatgtagaggagttaaaggttagggaatgggtgtctataggttagtgattccaggaaggaagatttgggaatggtttgcttcggcgacgggtcaacaacggaaaccggtaactccgggcaatgaagtctcctttgttatcgccaatattaatcatttgaccttgtgttctcatcactagtaacttttcagatatgatcatcagtgttttcttgctttttgtatttgtaatgtctcgatgtaaccatgtatttcacccatttgggttgataaatataaatatataattaaaacaagggaaaattggataaaaagataaataattgaaatattgtccatctatacattctatattcatatatacttaaatattatttatatatgttttaatataattaaattcctattatatccttagtttttttaaaaatcttgctaaatgattaaatattcccaaattaattagatttatttctaaaactaagttggagaaaatattgggcaaaaaacaatattaatttactttccttttttatatagataatttcatatatttttcttctatttcatatatttttcttctttgattcttgttttttttttgtttgacggtattttttttcgattcttttcacggtcacctgtttctattttctgttttggtagttttttggatatcttcaatttttcggagcttttgtatcgaggtaaaattctatatgtccttgcttgtgttgaattattgatttgtagtgttatgctatttctaaaagtttaatcaaacaagttgcagttttcatctttcgtgtgtctattttgttcatgtccaagtcctctgttactttgtctctttgtctctttgtctctttgtctcatacatctgactcttttcaaattattgtaaaactaatcaattttggttataacataaacgttaattttttttttttttccttttgcactaagtaacgtaagaagcaaagtctaacacttttatcacatgacttgtttccattattttcttttgttactaaaccttaatttgattacataattttgtgccttttaggcttattttgttgattggtgacattttcaaaaactttgcattatattccatactcttttaccaagattccatgattgttgatatttacacattttaacattgtttttgcttttgtctagacatagaaaatgagtgttgtttaaagatggaaatagtcacaagtggagaagttaaataacacttgcaaaatgtctcttttgaccaaaataaagaaaaatttgccattagagtatgattaagtgaagagagatccagtgttcgcacatatctttgcaatacacgaaaataaactaagtgaactagatttattttccctttttagaaataaattctaaattacatagaattggttttctattttctatagaatataaaagaaaaaataagaatgtgttttcaaacaattttagaaaatgagtaaatgttaaaaaatacattctaaattttctagaagaaagaacaaagaatcgaatatgtattctaaatttcgtagaaatagcattttaaatactatagaacataaatgaattctaaatttaatagaacatgtagagttcatagaatacgatatctatttgtgtgatcaaaagacagcttgaaaatgtatttcacaaaaaaaaccggatggcggctagggttctgcgtctagaggcgaacggcgagattttcttagatctatcttcttagaaccctagatttcagtcagagattgaagatttttcgatctgctgtgtcattaagctcgtgtggcttctgtttatggatttgttttcgtgttgaagttggagtgaacggtatttctctaactacaatgaatcgtcctcggaagaagaaaaagatgtctcttatggacgaactgaaagagctagatctgctaggggaaggagatgtggtggaaatcccagatctggaaatcgaagatctcatcgaagagaactctatgaatgtgattgtaagatgcctcaacccgatggcccacaaggttggaggtctggttaaagctcttccacctctctggggtatggaagaccgagtgcgtgggagagggattggagacgaccaagtgcgtgggagagggattggagacgaccgagttcaagggatctgtaccatgtgttatatcgcagaccttggtttgtaaatgggtggatagtcacagtggatcaatggaaaccaaacccaagaccggatttcttgcaaaagattcttttctgggtgcgcattaaaggtatccccatccactggctcaaaagacaaacggtggatagcattattgggcctctaagcaaaattgatgctgtagaattacacgccaaaaactcttagtctctggagtatgtccgagcaagaatctggattaatgcggatgaacccttacagttcgtgaagacagcaacttttaggacaggggaagtcgcgcgcattgaacttgtgtatgagaagttgttaaaggtgagcttcctctacaaaaggctcacccatgaccaatcggtttgctcctaccaagtgattgagggctcagtggcagccagaggaaagacagtgaaagggaaggagcagccaaaccaaaagggcaaaggcaaagggaagttgtttgatgaaggagccccatcggatcagccaatgcaaaagaaaagcaggatttcttcttctaaatccgcaccagctcagagaactacgagtgccaaagacagacccaattggaatgggaagcatggtggtatctctgctagccagagtcaacagatttggagaccaacgggtagagtgcaggatacacctgccaaaaacatggcttatcaaggctctgaggatctccaaactaacctcagtaaaaaaagtagatcaagcacaagtgggggaaaatctaataagagagcccgggtagagtcaggagagtctaagcagcactcaccatttgtgttcgagagattggggaatcttggtgatggtgctttgagtgcggaaagaagaggttccaatgagaagacgaaacactctcctttagtctttgaacgtcttggctctcagggctcatcctcgagtactcataatctactgaaatcaggtcattctgaacattctgccggtgtggcagctcaagtctcaaatcattctgcctcctctgtggcagctaaccgtcctaattcctctggtacaaaatgtgggaatgaaagtgacaccaattttaaagaagggttgatgggtaattctaacccttcgaaatctcaatgaggatattgagttggaattgtcagggggtggggaatacccctacagttcgacacctaagggaaatacgtggttagtatttcccagaggttatattcctctgtgagactaaaaacaggagaagttacctagagaatgttgtaggccacctaggatactatgatttgcatacagtagaaccagttggtaaaagcaatggtttagctttaatatggaaggagagtgtcaatattaggattattgagtcaaataaacggatgattgatgctttggtgaaatggcagaataaggaatttttcctgacttgcgtttatgggaaaccagtccaaagcgaaagaggggatttgtgggagaaactctccaggctgggaacgactagagacaaacctttgatgatgacaggtaatttcaatgagctggttgatccaacagagaaaattggtggggctcaaaggagagattcctcctgcgtggagtttagacagatgttgaatgcgtgtggtttatgggaagtcaagcatctggggtaccaattttcttggtttggaaaccgaaatgatgagctggttcaatgtaggcttgataggactgttgcgaatcaggcttggatgaactgtttcccaaaaactcaagcgaattatcttcagaaggtgtgttctgatcacagtcccttatttaatagcctaatgggaatggaatggaagtcctgggctgggtttaagtatgacaagcgatgggttcaaagggagggctttgtggatctaataactggtttctggaggcaaaatgaaagtagtagctgtagaaaggaaatctccaaatggaagaggcagaccaaacctagttcagccttaagaatccacgagctccagtttcgtattgacgcggctaccttggcagctaccttttgatcccccagtaatcaaagacttgagaaaagagccaaacaaaaagtattaccaagaagagcaattctggaaccaaaaaagcagattggagtgggctaataatggtgacagaaatacaaagttctttcatgctgccactaaaaacagaagggctcaaaactggatccaaaagctagttgacgatgaagggaaagaatggcacaatgatatgcagtttagaaaagtagctgaagcttactttaagaaagtgtttgcctcaaagatatggggtatcaactccaagagatggcagagatagaaccggttgttaccaaccaaatgaatgaagccctcttagctccagtttctattgaggaggtgaaaaaaacaatttttgacatcaacccctccaagtgcccaagtcctgatggaatgacggactacctatatcaacaattctgggagagtatggggacgcaaattattgatggaatggtgcaatagtttttcagatcggggaggcttgaacaagatatgaacaagacaaacatctgtctcattccaatgaagtgtaaggctgagagactaactgattttaggcctataagcctttgcaatgtcatatgcaaaatcattgggaaattattggcttccagactgaagaaggtgctccctcttattatctctgaatctcaagctgcctttgtgcaaggtagactcatcagtgataacattctggtggcccatgagttactccatgcgttgagctcaaataataagtgttcggaggaattcattgttgtcaagactgacatatccaaggcctatgatagagtggaatggaactttctacatgacaaattggaggcgttggggttcaatacaagatgggtaagtctgattatggagtgtgtcaagtcagtgtgttatcaggttctaattaatggctctccatatggggacattaagccatcaagaggtctaagacaaggttaccccctgtccccttatttatttgtgatctgtacagaaatgctgattaagatgctgcaaattgctgagaaaaaagaacagataacaggactgaaagttgcaatcggagctccccaagtctctcatctcttgtttgcggatgatagcatgttctactgtagagttcaagaggaggagatgaatcatttgagcagaattgtggaagagtacagtctggcttcgggtcaaagagtaaactaccaaaaatctagcataacctttgggaagaatgttccagaagaaagaaagattggagttaaaaagaaactcgacatagaacaagagggcggacaggacgtttaccttgggctcccagagtctttcaagggctcgaaggtatccattctcaactacttgagagaaaggctcaagcaaagagtgaccagctggcagaataacttcctctctccaggagggaaggaagtcttgttaaaggcagtagcgatggcccttcccacgtatacaatggcctgttttaagcttcccctcactgtttgtcaacaaattgttcagtattggcggagttttggtggaaaaaaaagcaggaatcaagaggaatgcattggaaggcgtgggatcaactaagaaggccaaaagctgaaggtggcctagggttcaaggacatagaagcgtttaatatagcattgttggggaagcaattatggcgtctagtcaccaggccaaaatccttgttagggagaatctataaaagcagatactttaggaagtctgatcctttacatgctcctcttggatcccggccttcgttcgcttggcgaatctttcactcatctcaagagctaataagacatggtattaaagctgtgattgggaatggagagtctacggatatttagaaccatcaatggctctcaggaaatctgacaaaaagtgttcaaaagattaagagattaagccctcaagatctccatattatctcgcacttaagatatgtaaaagatctcttagttgataatggaagagattggaatatggctaaactccaagcgtgttttcctgaggatgtgatccatcaaattgttcaaattagaccaagggaacagtccacgaaggatagttttgcctgggacttttcgaaagatggcaaatattcggtgaagtcgggttattgggttctcgtggaagtcttacggagacagcatgtccctcaagagatactgcaacccagcttaaatcccttattccagcagatctggaaagcagactctcctccaaagattcagtattttctctggaggtatataagtaattgtatctcagtggcaggaaacctgttctatagacatttggcaagagaaggatcttgtattcgctgcccagcacatgttaaaacagtcaatcatctgctgtttaagtgtgcctttgctcggcttgtctaggccatttccccaatgtcagctccgccgggaggcgaatggactgattctattttccagaatctgttttgcatattaaatgctaagctggtgcatccccatttggatattgatgggagtataggaccatggttgttgtggagattgtgaaaaagcagaaatgattatatctttaaggggaaagagtactcagcacaagaggttgtaagacgagcaaagaaggacgaggaggaatggagactgccaaagcttagtcatagccaaacagctcaggcacttgacccagtgcaatcacgagttaaatggcagccgccacctccaagatgggttaagtgcaacacggacggtgcatggaataagataacttgagctgtggtattggatgggttcttagggaccatcagaacacagtgctttggatgggtgcaaggtctctaccaaaaactgaaaaagttctgacagttgagctggaaggccttagatgggcagttttatctctgtctagacttagctatggaaaggtcatattcgaaactgactctcaacaattggtatctttgatgcagggagaaacatttagtaatcacctagggctgattattgaggatattcaacagttgcttcaaggttttggggagaccaaagtggtgtttatcaaacgagaaggaaatggcgtggcggacagaatagctaaggagtctttttcttttgggaatcatgattccaaattgtattctgtaatgccagagtgggttaaactctctgtggaaagtgataatgtgtaatcgaacatttgggtaatgttaagtttgaagttgagccaaaaaaaaaaaaaagaatacgatatctaaattttatagaacatgtgcactgtatagaatacacattctaaatttataacatgtattctaaatttcgtagataatattttcttcatccaaaacggcataattttgacgttataagtatcttcatgacttcttcaccatttgcctacaaattgttctgaattttatttgaaagattggttaaatcaattacaaatgatagataagaaatttgtgacatttgaatatagaatgcatagattgacaatatttcaaatttttttaatccaatttgtccttaaaacaatggtctacatgcaccatcacatattgtcattggattgtgaagatgcaagattttatcaagctacttcctctacaaccaacgttttactcataaagcttggcaaaatcatcaaatataatcagcctgaattgtagctgaagcaatatcaagggcggcttgattgaaacagacactaggagcctcctgcttcgactgcttgtacaaatacgacaaagtgacaacatagagagagaaccgaagggatctcttcagtttcatagatctagttcataagagcacctccaatgggaggatgtaatccaaattttgagaggttctcttgaattgttggtaaaaaaataaatcagaagtgattaaaattgagagagccagctctctgaagagtgattattgagattgagagaggcgacacatgtcatattgtgattgggttttattttttaacaaaagcaaaaactaaagaagttgttcattgttcctcgcctaaaaaaaacaaaacagattctttaattttcctctctctctcgcgacggtggccggtgattgtgtcgtggattactcgtaccgatgatttcgagtggtcgtgctcagaatctgcggctcatgttgccagacgtgggttgatctaccgtggaattgttccagtgatggcgacacgggagctttggctaggtcttcgaacaaggattcgacggaggagaagggaatatgtaaagcgggagactcgattgtggcgttgcacaagatcattaaggtaagaggtattcttgagattagcttggttgaacaccaatagtggcaagaacagaggaaccaatagcgcggcagctaatatgtgttgaaggaaaaataagcattgtgagagagtgatcttattgatttagtggcgttacatgaactttcaaaaatcaacaagctctcagtcacaacatttgttatcttttagacaaagaattttaagagagaaaatgtccttgttatttttgtagaagttgaattggatatcttcagataaacatcattaaaccctaatcaattttgcttgggaaatcatccttgaaatggagattttagttctcatatattgttttatattttgttgtcaaattgatgcagagacatttctgtaagtgccaagagactggagatggaaatcatttccgagtgccaatacaagattcatgaagggaacggagaatgagggagaagtgttgatacaagattcacgaagggaatagaaatcatttgcttgctacatttataggaatgctttcttacgaaggttatctagttgatgttgtctctatattgctttcaatgtcgattgtgagtggaatatcaatgtctttgtttcgctttgcattgtaaaacgttttgtgagtggctcattcatgatttgattctgcagatgccaaactccaagattgccttgtgttttttttttttggtaggcagattgcctcgtgttaatttctcttttgtgagtggctcattcatgatttgatcatgaacatagtattttaaatttctgaaactcatacacatttgtttataccatgcttaatttggctgacttttgatctatgtagttaatcaaggcaattctttaaatatgaaagtttagagagactaccaccagagagattaccattggacttttcaaaattaacaaaaacaaaacataagatcttttctaacaatttgacaaaaaatttattaaacaattggagagagcccatgaggagactctcaccattggagatttccaatggtctaaagtgaaccctctaaacatctagaagctcttatctctttcttcttttttcccttacttctaaccctctaaacccctaaaagttttcgcaacactacagtgaatttagaccaaaattcacaacatccaaatatacacatccgcactcttgaaagacatataaatatacaattaaaatatttatataaaaaaaggattttttatttggagttaaacagtagaaacagtactcgagttgccaattgcatcttctcaaaccacacttgttatatagtggcatatttaacccattttcagttatgttttgatttttatactatctattatatatttgagaatgaaagtactattaaataatgttggaataccgttatacagctaagcaaatgtaaagacaagcattaatagtagtctatcacgattctaaatatagtactatttagttgtcaaaaatatatattattatttaaaataaattaattcaatatgagataattagtagggtttaaaaggatcatgactttttcttttaattcatatgttacatgtaattctaatattctcttattttctatttatatgcatgatattatgttttgtagcagtttataatatcttgtagtatttttttaaaaatattattttgtaacctttgaatctttatttgtcatttttctgttatcaattttattttgcttaattaatcccaacttgtacatgttgtcattatttctgatattaataggttgtttcctgttttaagttctctcatcatgcatggttaattttaccaaaatcaatcgaattatatagtttcattatgtagtgaaaagaatcataatataactaaacttttatactagatatcaaatgtttcaaataaaaaaacgatgaaaaaaagatgaagcaaataagttgaagaagaaacatgtttttttagttaggttaaatccggttattgttgtatttggttttaaaaaaatttaaatttttttggtttcttactggatttatatagttttctattaggtttagtttgtcaagcggttaaacaaattttttgtggagaaacatatttaaactttgaatttatagagatgtttttggggccatctaacatgtggtcatagtataagctctatatattgggatgtgatacttttcataggaaaataaatagtcttccatacttataactaaatagtagaggaggtaggatacaattttcgggcatgcaaggttacatttaaaaggatctgagaattatgagcgtgtcacggacctaaacgggttgatgcccatacctcccgacgtagaatttgagcttttttttctccaccaaacaagaaaacaaaaccataagctcataatctgattgcgatagaatcaaaacaaagagtgtgatttagtgtcagtaaaacttatgtatcttttggtttgatgttctctagaatgatgtgtttgtaaaactcaagcttaaaaacccattagtttggtagttcaaaagaaacataaactgaaattacaaagaataagccatatcttacgtgaaataactagtttgactctattttgtcacgtataactagaatgacctatatcttttgcgaaaagacattataacatgttgtgtaatagagaaaacgaaacgggcatgaaaaattacgaaactaagttttttctatatttttcgacaaaattctttagtttattacttgggactcaagttatctccaatttagcacttatacgttgtactagttcattttcaaatcaataaaatactacaatttttcaaagtcattttgttttagtttatcatttattaacagaaacgcaaatatacaagcttgaattttgactatgactacgacaactatctcacaggaaggtagaaaacttttggtgttattgtgcacaaatagaaacatagggttaaaaatagaatacaagaaatttcaggaagtgaattaagaatatggtagacaataattggaggagtaataacaaaccggtttacaagaaaaaccggaaatcacactaaactcggtctttgaataataactagcattatgcccctgttataactcttaactaagacttttaaaataaagcagatagcataaatatacaataaagttattattattgactgaagattaatatacaaaagattaagaaaaagatattaaaaatgtacaacttttctctctaataaatcaattgtgatacacagtaattaataatttgagagtttagaaatataagagagtataagtacaacaataatgttgggtatatacatgtccgcttatttcattagctccaaccaattgtaatgtgttcttcttctaattcagtttgcaaacatttgttgacacccaaagcaaaatgtaaaatgtgcacaggtaaatacatgatgcgctgcctttctaacatttgcatgtcaaaagataattatcatagatgaatacataaagatgcaattctttcccaaaatcctgtcaaacagactaattaaaccattgcgtcattgaatcagtacaaaaaaattctttaccgttagcgcaaaccatctgctatcttatgttatacacagcgaattcacaaatgctatgtttgcggcaggtatagtaggtgtcacccctataacagcattggttagtacgctatgatatattttgatacgatagcaactctagaacgtcattatagtattttgatatagcactttaattttttgttataatttactaatatctcaaattttgtgtcatgataccttcacctaacatggcaactaaatattgctgtctaatataatttttgtaactttgtgttttatgctataatatataatttttcgacaaggacatcgaagaattgctataataaacataatgatggcttttgattatgcgttaatataatctactatagttgaataccaccactaatttttgctattatatctgttctcatagaactatcttttgtgattctaaacctgttttgcataacataaatatacaacatataacataaatctgaatagatattatatcataagtctgattccaatccaacatacaccatttaaaagttaaaacataatcattcaacataagtaactgcaaagccaaatacataactagtctaattccaaatttcataacagaagtaagttagtctagtcttaacctaattaaaactagctaacttggaccattgtttcttcactccctgcaacaattaacaatgtctcgtatcagcagctaaataaaaccaaagcacaaggatcacaacaatttcaaaacttaccctagattcttcaaagtcaataggtcaccaatttatccattaccctagattactttatttcatcagatggcctccaaactgctgcatcatctacattcactacatctatccaaactctagcgaacatggtgtaccttttgatctggatcgattgaatgcattcgtcctgtaccaaccacccgcttctttccacttatatccattaacttgcacttctgattagccttcgaaccttcagatgctttttggcgctgtcatattacattataaaccaagtttaaacgcatgtagaaatttaattagatgcagtttttcaaaccaacaatcaaacttaccggagatttccgcagaggggattgtgatgctagctgagttttcttcacaagagactttggaactactgctggtagcttctcaccaagagattttgcaattgttgctgcggattctgaacatttggctgcagatacatgtatagaagaattataacctgatgctgccttttgtgttcatgttgctccactttgtggagctgttgttgctgactttcctcttcatgatgctgctgttggattagttgattgagaactctgaagagaatcttctaagtaaacaatcacacaacaagcagacaacattcacaaaatctacaaacttatatagtacctctgacaagagaaaacatttcacaaaagagaagatggttctaatctgacctgtgaaaagagaacactgataagcttcaaagtcccattgattcactcaacaacacttgcaaaacaaaattattgaatgagcaaaatgttatatattcaagaaaatgaatcaatgatagtttgacataacaaaagaactaaattgatgtgacaataacaacatgattcagacaacagaagaagcttaatcaatgacaatgaaattctcatgttttatcacccaatttttttttaacaatttcagtgttaaaatccaaaattttgcaactcaaatgcccaaataaaaacaaaatttcgaatacaaaattgttcacatgcaccaaaagcaacccacaaaaacattactggaacaaataacaaaggcatgcaaattcgactaaattttaagaatcgaggaagaaaaccaaactacaatcacataaacatcgattattgagtctcaaagattgatagaagcagatctagagtaacaaattgagtgtcaaaggagaaaaaaatcaacggagataagaacttgccttcgattcgatctcaaagtggacagatctggagcggattaagtgccagcgggaggttccagtagcacggagagtttatacgacggcgacagagaggcgacggagaatttaattagttcgtcggactgagagagttctttgatatgatagggtttttgataaagggggaataagtgtttggagtttgggttattgtcgattgaataaaaaattgactaagtgtttggcggactaagtgttttgggttccccctcattaaaattctatattagcgtttctcaaacgctgtaatatgataaccaaaattacatgacatcttcaatagcaattgagtaaaccgtgctataacgttatgctattaataaagacttttttgtagtgtaatgcaagtttctaagtttgctcagccaacaaaataatattttagttgtgaattgcatttagcttttgaagtaagtgaatttcccaattcaatccaatctgtatattaaagacattacgttttctatataattatgatgacttatacatcaaacataaatgtaatatacttacttgacaataaatacacctggagaaagaggatgctgaaaaaaactcacaaagaacttctcaactaatggccatccatgcttggttgttatgttctccgacagaagattcaaaagaagaccaaagtgaaacaaagaaaaagcaagcgaatgagattttcctacagaagacattgttttgttttgtagaatgggctaatacaaaaacgaaattgcatatataaagaagtaaaataagagataaaagaagaaatttaaaaaatatgagatataatttatcttaaaaaaaagaacttaagattcgatatagctataaaactcactcgaattttaaagcaactgttctgatgagaagccaaaatttgttgcttatcctctagtgtttgtgagacaggagaagcataggcattgattgtattaaagaataatcctatgaaaaaagcatcgaatccagtcagataaagcagaaacaaagcaaaaataaacaaacgccgtggaaatctagaaaaacggtatatgattttcggatatatgaacaaaaattacaaacagaaatagaagatggtaaattggttcatcgggatgaaaaaatacatgatttctgagtaatcgattaatgatgttgagaaaaccatctttgagatattatacatactacaatagtaatggagtttttgtaggagaaaaagtcgtgaggtagagatcgtggggatgatagagaaaaatggtttgagaaagaaaaaagttaaataaaaacacaagatattttttctttttattataattagagatgaataaataaagtttaccgtaaaaaagaaagagtaaaataatggtactaagctagtgtgtcaatcatataatgcatcagttattgaaaaagcaaaggttgatttaatataatttggaaataactagtttgactctattctatcacgtataactagaatgacctatatcttttgcgaaaagacattataacctgttgtgtaatagagaaaacaaaacgggcatcaaaaattacgaaactaagttttttctatatttttcgacaaaattctttaacttattacttgagactcaagttatctccaatttagcacttatacgttgtactagttcatttgcaaatcaataaaatactacaattattcaaagtcattttattttagtttatcacttattaacagaaacgcaaatatactagctcgaattttgactatgactacaacaactatctcacaggaaggtagaaaacttttggtgttattgtggtgttcaggttgacgccgacctttccgaggaggctacgacctttgctgttccgaaagataattcggacctatgtcaagtgaacgccagacccaaccataagttggttaaagggatgaagagtaaagatcaggattggctgcgctactactttttcgtggagttatccgagatttctgttttggatcttgacatctttttcatttccgagtggaatttgtttccaagtagatcttttttagttatggtcatgggaggctatcgttaatgctattttctaaccgcgttttgtttggttcgcataacataatttttgacctcgaggagcttgtggagagatatctgcgagtcttgctgctgttaggacgagagaacctttgcgttggccagacgttactgattcatttgaatttcgtaagttccttgaaaatcttgttcgtttgtccgtttgtcttgatacattttttacgtgaaactgttttaaagattcgttgttacacttttagaaatgagaaaagctagttgtcagtttccgatttatgccgatacgtttggagaaggtagttcggtagcgacgaatgtcaatatattcgtcgttgtaaccaagccatagcaggtggcggcaaaggtttcagagagtggcgtggtagagagtaaccaacgggatgctagtgaggatagggcgacacaactttcagatgctcaagcttggaagaaagcttcaagttttgttaacaaggataggacgacgcgactttcagacgctcgtgccgggaagaaagtttcatattctgttaacgaggatagagctatttttgtgagcgatcgagtgtcgacgtttcctagcggaggaaggtttctggtagaggtagttcaagagattctttcccattgtccgggaaagaggttctactcaggatattcaggaggtcaatcactccttttcgttcaattatgataggaaaagttgttgtttccagacagcagttattgcggtgagtttggtagaaacgttatcgggtcgtctcgtgagatgcccccattgaatcccctatagcgaagaatctctaccaaacttgggcttctaaagagcttatgtacagttatactctgtttcttgctttgtcatgtttattgttttatgttatgataactttttgttctcttttttatctgttatcagtcgtttgccgccggatttgcgatatacaattctctagaggaaaaagcgagagaggcaaggaaggaaacgctggccgttgaggaaaaacgaaagaccgcaattctcgtgatgatgcctttcgtactgttcgttccgaacggagatgctttaaagatgaagttgctatttattaagcctaaatcgatcagttaaagaagcatatccttgacagacgtgttgtcaacgaatctcttttcatgcaatgtcaagttgtaggtactcagaaactcttgaagcagttgatcaaaaaagttagagaaatcatgatgaagactatgtgtgagcttaaggttgacaaaaactcgatattcatatacacgtacactgaaaccttttatactcaatcaactgtttttggcggaaaaaaactaaaacccctttgtcaattgaaaatttatgagttgaaatctttaaaattaacctagattttgaatcaaatcattctccaaacgaagttagggaaaactaacccagatttgtcgtcgccgccgatgcctcatcattatccgaaactcctcgccgccgactactcttcctcgtcgccggcattagagttcttctctgaacagttaatcgataaacccaaaaatcgtcttattgttccacactttaacacttcctccacttaagcaaagactcgaactcgaacagagcctcaatcggaattgtgtttcagtttcgtcggaatttctctggttcttcgaaaacggacttcgtctgttctgctttctcgaagaaggaatgacagtttttgatttattttaagttttaaaattaataattttaaatatatatttaaattatttcgtaaccagaaacggttaagaaactgaaccggctccacgaaactaaaccgcctccgttagtttctcgttccagggcaaattcggccattttgggcctaatggctaaaaggtggttggccaagcccactttgcctctttgtgaaaaaaagtcaaataggtgtccacggtgaaattttctttatatattaaggggtttctccgttttcagttacgttgtctcgttgtgaacgttgatcttcaatcttccaaaggatttggtggaggctctagggttccagtgacatctatgagaaaagccagatttacttgtaaaaattggaatactttatcttaacgacaacgttgaatcatgtatcgagcatgaagctaaacttattagcctagacgattcatatgaagtccaagtatctaaagtttttcactgcgacggtttattgttatgcattacaaaagaccatactaagctcctagtttggaacccgtattggggtcaaaccaagtggatcgaacccatacatacttcataccaactggaattgtattcgtatgcgattggatacgacaagagcagccgcagctacaaaatcttgagtttccttgattcatattacccaactacctttgttgatatcaaaatctacgagtgtaactctggttcatggagggtacttgatgtcgctgctccagacgggcaggtagatgattatgagggtggagtctctctcaagggaaatacttactggtttgttaaagagaagccttcagaaacaacagtaggtgaggacgactctttcttagtatgttttgatttcacaaaagagagatttgggccgcttttgcctctaccgtttgagtggtatcctgaagataccgccactctatctagtgttagagaggagcagcttgcggttttattttagcgatgggacacatcgatgtgggagatacggataactactaagattgagcccaacgcggtgtcgtggaggtcgttcttaacagtgaatgagaacactcacttgctttggctttggctttcaatttgcggttacaggtggaagtttctttattgacgaggagaaggaagtcgcggtggtttttggtaaagtctacaaagacgaaaatggttatacaaaccaccgctctcacaacttagcagttggagtggatggttccttgaaaaaagtgtatgttggagaatctccagactgaaattgttatccacttgttgctcttatgttccaagtttagtgcaacttaattagtccattttttacaatacctatgatctatttcttgtgtatttaccggtttcttttcttctcttttgtcacaccttctttttgttcccatatttgacttcgtttcactgccttgagttacgtaatttccttgtcctcactacaaaaaaagtcttcatcgttagcgcaaactatctgctattgtatgtaatacacagcaaattcacaaatgctatgtttgcggcatctatagtaggtgtcacccctatgacagcatcgttttgtacgctatggtatattttgctacgatagcaacgatataacgccattatagagttttgatatagcactttaatttcttgttataaattactaatctttctaatttcgtgtcataatactctcacctaacaggacaactaataattgctctctaatataagttttgtagctttgtgttttatgttatcatatataattttttgacaatgacatcgaagaattgctatagtaaacagaattagtgcgtttaattatgctgtaatataatctactatagttgaaaacaacaaccaatttttgctataatatccaatctcaaagaactatcttttgtgattaattctaaacctgttttgcataacataaacatacaacataacataagtcttaatagttgttatattataaataagtctgattccaatccaagagacaccattcaaaagttaaacataatcatccaaaacaagtttaagcaaagccaaatacataacaacacaagtctgattccaaatttcataacagaagtagattagtctagtcttaacctaatcagaaaactagctaatctggaccatagattcttcactctctacaataatcaacaatgtctcatatcagttcctgcataaaaccaaagcacaaacatcacaacaatttcaaaacttaccctagattctgcaaagtcagtaggtcaccaacttatcctttggccatacaattgatgaaccaagtgaatctctcatatactcgatttcatctgatggcctccagactgctgaatcatctacattcactacatctacccaaactctagctgcattctctcccaaacaaacatggtgtaccttttgatctgggtctattgaatgcactcgtcctgcaccaaccacccgcttctttccactcatatccattaacttgcacttctgattagccttcaaaccttcagatgttttttggcgctcacatgttacattataaaccaggattaaacgcatgtagaaattttattagtcaatatgtcaaaccaaagacaaacttaccggagatctccgtagaggggtttgtgatgctagctgagttttcttcacaagagactttggaactactgttggttgcttctcaccaagagattttgcaattgttcctgcagattctgaacccttggctgcagatacctgaatagaagaattatgacctgactttccttttgttgctccattttgttgcttctcaccaagagatttctctgttgctccattttgttgacttgttgctgctgactttccttttgaggctgatgctgttggataagttgattgagaactctgaagaggagttttctgaactgctgaatctgtggtgttttcataggaaactttgtgggcaggccatgctacaaaagactgtaaacagtcctcaaggtatgtcacatccatcgttggcctccatatgaacgtctcaggttgaagtattacatccacaaatactttcactgcaacaggtccgagaggaagcccattaactaatgcagattggtcttttgtctgccaacgtccttctgcaacaataacgtcattggaagacaaatccagtagtttgcacttatttccataagtgggtcttggtccctgtcaaacacattaaaccaatgtcttagtatgactctgaatatattagtatgactctgaatatataacattttacctgtgcaatgtcttctggattgagcttctcctctaggctaacacacatagcaacaggccaagctatcatctgaccaacagctttctccataatttccatgttaactgcgggtctccaaaggtatgcttctggtacaatcgcagtgtcaatcaatactttaacatctgtaggacctaagcgacttccattgactatctcatccggatcagaagatataatacaaccctcagcaacggttgcatcagtaccagcccaatccatcaagatacacttaggttgtgatccttggttcacactctgtataaggaatcaataggctattatcatctaattatgtaccaagagatcaaaagtatcaaataaaagtgacttactcttgcagctgaggtttcaccaacttcagctgattgtctctataccaaaaaaaaaacaaagtcaaatatatgtactaaccgattgattagctttatgtataagtagacaagtgtttacatggttctttatcttgtcaattacttcttgtaactcattgaccttctgctggagctggtcctgtttctgttgcatttcagccatacatttgctttttacttggaaacaagctagtttggtcttgttcatatttcttcccatcgcccttagtctaccaggattgtcaggccctaagagttggctaagtgaatcttttgcttcattcgtcccatttgattgaggaccactgctaacaatctcaactgcctttttctgcaaaccatcacacacaatcacaaaccagtccacacaatcactggctaagttctggatttattgcctatcacattcatttcaaaaccatcacaaaccagtccaatttctgttccatcactaacctatccaatttaacaaaccatcactaacctaacaatcatcacaaaccaaaatttcacaacttccaaactataacatactcacaattttttcagccgcatttgtattcactggtgttccatctttcttggtccgtgacttaacccaaacctttagcctcgtcacttcagttgggtctgcactaccagttttctgaaaaacacaacatgccaatattagtagcaagctaagtgttttaaaatttcaaagcaataaaaaacataacctaacagacacataagattaccatatcttctgcaagtctaaccatccctctacgactacaagtgtgaggaatctggttccgccttctctccttgtagttatcgcttataacctaacaatgattgttaattagtaactttctacatagtaaatatacttagtttaatcttctccctcaacataccttaaattcagggctagttttgctcttcagaaattttctccactcaaatggagaaacatttttaggtctcagattcatcctctactggtttgtctttgcttctctaaacttagttacttgccttgatttctaggatctccacaaacatcccatttgcttaagcactgcaaccttttgatactcctcatctagttcaaaccttgccttcaatcaattacagaaaaagtgattattgctgtgataaggaaagatagtcaaatattacaaaaaaaaaaaaagtgaagtgttacctggacagatttccagagaagtgtcctgatttcttcacctatttttgtccagcgatcaattgtgatagggacgtgttcacggaccaatgcgcctgcatatgatgctaacttaaatgagcctttaccaataggctctcccatcatggtgtactccactctcactctggcatttggatccttagcaatatctttcatcctagttggtccacgctgcctcttggtcttaggttgaacagcatcttcatctccagataattcaagctcgccttcaggttcttcagctgcttgcacttcaacttcgttttctgtctctccattaatgtcttcagcttcgttttctgtctctccattgatgtcttcatcagcttctttttctgtctctccattgatgtcttcagcttctttttctgtctctccatcgatgtcttcaacttctttttctgtctctccatcaatgttttctgctggaacaacagtttgttctacagctgttggctcaattgtacccacatactccacctcatcattgcatttcttagcagcaacttttttaggttgtcttccacgctttttcttctgttgtcccattgtaaatcacttgagaaaaaatgataaaattaaatcagcactcaaagcagacacacaattaacactaaaaacagatagacaatcaataaattaaacacaacagacagacaatcaacaaacacaacagacagacaatcaacactcaaagttaaagcaaagttctacatttcaaacataaatcccttcacaatcacttctctcattctctgctacttccaagtcaacatcgatgtcaactgttgttggcaatggcccaatgtcaagagtaacatcgtcactctctttctctctaaatcttctcgacggacctctcattggaacatgccaagatgatgagtcatcttcacgcaggaaaaacacttgttttgcctgagaagccataatatacggatcccttaaaaaggagacttgactatgattcaaattaactagtgtaaacccttcttcttccttagctccattgccctttattgcccagttgcaacgaaataaaggaacatagaagacattatagtccaacagtataatgtctgttatgcagccataatactgcaccaaatccaccacttgttccttatccttcgcactagacctacaaactgctgtggcttcatagaaaacaccactattcagtgttttcctgtcaactgttcttgtgtgaaatcgttgcccattcactatgtaaccagtaaatgatcttgcgcaacaacgtggaccataagccagccatttcagtgtttcaccatgagtacttgaatcaagatgtatctatcaaagaaaaatagaaaaagtcaggctcttatatctattgctagcctgttctttaagctaaactactaagtgaaagacaaatactagcctgttctttaagccaagatgcaaaattttgagtgtgcatactccataacagagacgcatcacgtctgcatctcccattagtgttttgtagaagctgcaggtgctcactagtaaacagagaaaacaaaattcagaatcagcattcatagaagcagaaagtgaaaagcaatatagaaaagcaatagaaagagagatagattgtaacttactctacataaggttcgacgacagccatattctggatcacagccaaatgagctatttttctctccatttctgtaagactaataaaggtgcctgcagagataggacgccctccaaggatagagttgttctcatactcagtatttctatctgccttttcctgaacttttgttgtcttcttcaaaaatttactacagaattggatgcactcttcagctaagtaacattcagcaatacacccttcaggtcttgctgtgtttctcacaaaatctttgaggactttcatatatctctcaaaagggtacatccatctgaaatgaattggtccccctaaccgagcttctctccctaaatgaactgtcaagtgcaccatgatgtcaaagaaactgggaggaaaaaacctttcaaacagacaaagggtttcaacaatctcagcttccatttccaaaagctgctccatatcaatcactctctgacataagtgattgaaaaatttgcataagcgtccaattgctaccctaggacctttaggtaacaaccctctcaaaactattggaagaagctgctgcattaagacgtgataatcatgtgatttcaatcctgttaccttacagtcttctaaagatacacctcttgcttctgaacagtagccatctggtcctttaaaatcaaatagacgtttgcagaatagcttcttctctgacttggagagagatcaaagtgctgcaggaaggtatgtccttttccctttggtttgcagatgcaagtccttccttataccaagcacctcgagatatttgcgagcattgaccatcctttgacttcccacaatgcaacaatgttgatacaatagatacagccacatttctctccacatgcatgacgtctaagttatgccttactagtaggtcctgcaaaacagacaaacaaaatgcattagacattttccctttgtttcaatctaaacaataaaacatatttcaagaaaagagaacaaacctgccaataagatagcctgaaaaagattgaccttttcttccatcttgataactcttcctcatctacttctgcctcttcttcctcatcctcctccgagtcactagatagatcatcactatctgatcctgatttaacagactccggttcctttcctctgatgcaaataaagggtattttgcattcatctgatcccatgttactgaatcaacagggtggcggagctttccatctgtgcttttgttgtgaaaatgccaccttaaatccctagccatttcctcagatctgaacattcttttgaggcgtgggattattggaaagtaccgcaacactttctgtggaacacctttctttacttcacctgtatgcatgtttgtcttccatcgtgaagcattgcatttaggacaaatctggagcttcttgtatttctttctgaataggcagcagtcattaacacatgcatgaatcttctgatagcccatatcaaaggatttcaaaaactttttcacctcatacagtgatgtgtgtagcacattatcctctggtagcatctccggcaatgtctctagaagatcgttgaaactcttgtcagaccagccatttttggtcttcagtctaaacagagacacaatcgcggacagcttgctatggttaacacagcttggatatagaggtgtctcagcatctgcaagctttgcaaggaactcgtcttctttcttgtcgtcacgttctgcaatctcgcccaattgaaccatagcatcaaactcttcgtccaaatactctgcagcctgatacaactcaactacttcatcattccactgactgactttgctttcactttcaccaccagacaccaattctccatgatgataccagtcacaccgcctcttataagcctcatccattcctcttgtcacaagatgatcaacaactacacagcctgagtgacgatctatgttacgacaatcaatgcaaggacatacaatcatatcatctcccaaagccgcagccacatcccgtacaaacttgatagcccctctctcataagcaggatcagctctttgttgcagaagtagaaagagagaaaaaaaaaagaagtaaacttcccaaaacccttactgaaacctaaggaatataattataattataattatattgcttacctgccaagatgcacccaatccttggccaccattctatgtgctaaccgtaacataaacctttagtaacctaagcagcataccatattgtgtaaagaaaagaatcttctgaataagcaatcacacaataagtagacaacattcacaaataaattcaaacttataaacgtaatcaatcaaagcaattcaggttttaagtacatgctactcgattatagtagcaggttttaaacaaatgtaactcaaaagaatcttcgatataaacaaacacagaatacaacatttacaaatcactctatcaaaacaattcagtagataagtacagttactagattatattagcatgttttaaaataaatgaaactgaaaagaattcttctaagtaaacaatcacagaacaagcagacaacattcacaaataactcaaacttatatactaactatgacaagagaaaacaattcacaaaagggagacaatgatactaacctttcctgtgaaaagagagaattgataagcttccaaatgtccattgattcgctcagcaacgcttacaaattaaacaaaatatatagaatgagcaaaatgttttatattcaagaaagtgaatcaatgatagtttgacataacaaaataactaaatcgatgtgacaataacaacacgattcagacaacagacgaagcttaatcaatctgacaatgcaattctcaagttttatcactcaataaaaaatcaaacattacagagccaaaatccaatatttgcaactctaatgcccaaataaatacacaatttcgaatgcaaaattgttcacaagcacctagagcagttcaggttaccattactaagacgaaattcatatgaattcgcaataaacaaaggcatgcaaagtagacaaaattttaagaatcgataaagaaaacagatatagggtaacgaattctaaaatcacacaaacatcggttattgagtctcagagattgatagaaacagatctagggtaacgaattgagtgtcaaaggagaaaaaaacaacatagaaaatgacttgccttcgattcgatctcgaagtggacaaatatagagcggattgagtgccgacggaggttccagttgcacggagagctttcacgacagcgacggagaggcaacggagggtttaatcggtggccggaatagtgagttcgtcggacttacggctgaggactgagagagttttctttcttagggttttcgaaaagttgttttgtgtttgggttttttctcgaaaatgactaagtgttatttggcggaataagtattttgtgttcccgctcattaaaattttatatcagcgtttataaagtgctgtaatattaaaactatatcttagcgtttatcaactgctgtaatataataacgaaaattacatgacatatgctatcaatgaagactttttttgtagtggctattgtattagattcatggatttctattttctcgccaaatatgcggatctatcgtgatgcagaacaaagcaggctgcgtttaacttaaaaacccacaaaccattaaatctgttaaacgtatcattaattaactcgatcgatgttgtacatgttttgtaaggagaaacagcatggtgcaaaccaggcatctttactgaggtttgaagtgttttagaaactgaatcaggaaacatattcacttgattactacaatattcatctctctcttctcacgtgtaagtgatatgatacaattatttttaaagttctattgctacataattctaactttcaggtgaagaataacgtttacttcatctgtgcagaccagaaattcacatctcatagaattaagttgtattcaaacctctttaaatacaaaagtggaaacgtatacactttaagccgtgtttcactaaaaccatgatccttaggacgatcaagatgggtaaaaaaattcacggtttcacgactggtctggaaagatcattgttttagctttatacctagtctcgaaagatcacaagtgatgatgagatttggagaaagggagagagccgagaaacgaaattggttcatgattgcaaaaaaaagagctttcatatctatcccaacatacataacctaaagctaaagtttttcctctttagcttctcttcaacgcttatttttatttagtaagttcaaagagaacaccaaacggtataccatatttagttgttcaactctatatataaagcacggccaatggtcctcaaagatagtaactaatagtaccgcgaatccgcgatgattatttctgccaaagaacgaactttaatagtagaccatgctctaaacatccatgatcacaaaataatgatttcaaccctcggaccgagtcatgtgttagctacgacttttgcatagaccgagaaatcgaaaaacttgagttttccagtttggccaagacttcaaatatgcaacactaacctgacatcatatgttactattgaaatatgcaacaactcatgatggtgacagaaacataatgccaatttgctttagacttaccagttgaggtgcatctcacaccaaagctaaccgatatagaggctaatctcactcaatcaagtttactaagaaatgaaatgaaaaaaagtatcccaaaatggcaactttggagactcttgaggcaaaatacaagtttagaaaacccagcatcgtgactgagcaaaagagagactacttcttccctaactatttatgctgtgaagccttgtagcatgataggcaatatctaactaatcaactaacataacgcaagaaatgcatcaaatgaaagctttataactagtctcgaaagatcattgttttatatacaggctacagaaagtgacattgcgtttttcctgacctcaacgttttactcgcgaacaggacaggcgcagtctatgttactggggaggactaaacgctgcaaatttagcctgtcaaccaaaacgtggagagataaggtttttcagacaagtattagtgagagttctggaaaaacttttgcaatcatgggaacgaaatagaaacccaagaaaaaaagacagaaacgacatatctgccctccttgaaacatttcacttgctagattagcagtcatggctgatacaagcaattagctggtgctgtatttctcacacgatcgataagtaaagaaagttcttggttagcgtaatcaagtcgatcctttgagatcatagactctgtgaggagagtttctgtgagcgaatgaaatgtttgagcagagtcatcgccaatgccctgtccattctgattctctgtagctacatgaggactttcttgtctccatcgtaatagaaaatactgttcaggtatatggaagcagttcttcacggtcagtacccgaagagtgtgcctgcacaagattccggaatgctcaaattccttgcacgaacattggatctcctcgttttctgggttccagatcacacaacattccccttccattttcttatagtgatgtacgatgaatggaccattggccatctcagccacagcatactgcacagacaaaaccatttcgttttgcaatacgctaaaggcataaggcgtcagaatcccccttgcatgatcttccataggcatacaggttttcaaactcggatatgtgaatcgtggcaggatttgcttggctagacttgcagcagcactaacctgcaatgcactctagaataatgaatcaaagcagcaatgaaataatatcgaaattgaataaactctacggttcatatgattcacaaacctcttcaagtaatagttgcatgcatgtcgctccatcaacaactcttttcaagaaagaatctatagatagattaaactcagaagtcatagtttgagctacaaaatgttctctgatgcaacaaggtaaccaagatgctcggcacgaataaagcaaagccgcatgcctatctggaacaagaccaaaccgagtgacaagaagatcccactgctgttcaaattcatccacattccctgcccggcataacatatcaaaccctgctctaaattcttcatagtgcgacccaagtgtctgagaaaaccagctagctaatttggagacaatgtgcgacataaataccacatggttagtatttggcatttccctcccaatagcatctttaagtcctgtatctatatccgtcaaaattgtctgaggatgtcgtcccctcatgaaacgaacaaaagtctgtccaaaataaaacttaaacagtgagaataaccacaccatatatgtactccaatcatgacaattacaataaatcggatgcaacaaacctgtaaagcccatgtgaaagaacgacaactctcatcttgcagcaaaacacatcccaaaagcatcgcctttccattattatctatcccaaaaaaaacaccaagcagcaatccataaggtaccgaccgataactagtatcgaaaacaaccacatccccaaacaaagagtaaccccgaacagaatctccataagcccaagcaatattctcaactttctgattctcatcagaagtacaatcataaacaaaatccatatctctctcagccaaacctttacaacactcaagaagctccaacgtatcactctcccgcttctcagtcataaaagcatcattctcttgaacactcttcttacaagctctaacaaaattcctaacatctttctcaataaacggtaactgcccactcacaacacctttctctaactccaacaacttaacaatccgattaaccggaaaccccgctttcgacaacaaaagaatcctctcctgatcactttgctgaatcttcctataagcaggaagcaacctaacttgatcatcttccaaaagctcatgattatgaacattactaaactgtgaaacataccaatgactaacaccatcaacaacttctttagtcaaatacaacttaccatcacaaccacatctaacagacttacgctctcttggatgctctacattagctttcttcctaggttgattaaaaccagaacgataacaaacgaaatctcttctataaacacctagattctgactctctgtagatcgtgctttacgaatcgagaaaccactctttctagcgaatgtactgtaatactcaaatgcttcatcgtctgtggtgaagatttgacctacgtatggtgtaaacacagtatcgtattgtgatgttggtgttggtgttgattcgatttcgctttttgttattgttgattcgtcttcttcgagtctgatgtagcatttccaatcaccacaaggacattgttgacgacgaatccagatgttgttcaatggcttcaacgccataagacaaggggaaaaagcttcgattgagagtcgaaaccctagagattaagaaacggagtggtttttgggtttagaaatctgcttgcgtcttcactgaaggatctcgatgtcggcttgattctccgattagacaatcaaaggacgatattatcacttgtggaaggagagggagaatcgggaggtgtgtattaaggaagaagaaaccaattagaattagatatttgggtctgaatgataatcgctgattttgttgtgcgggaaaaacgttattgcataatagtacggttcaattgcggtatgtatagaactaatatattgtgggtcaagtgtaatttgtacaaaataagcagtatagaaaaatgtttgattggtaaaaaaagttaattgcaattcggattatagattatatatatactagtattaggtccgtgcatagcacggacagcactccaaaataataaataatataccaataaaatgtgatattaattataagtaataaaagataatgaaaataaactgtaacataagttcaaaagagaaaataaacactatatggtcatagataacatacctaatgttttattttgtttaaccaaaatgtaataacaaatagtagtataagaaaatacagatgattggattacaaaatcaaatcacaactaaatttcttagtagagattgacaaaaagagattgtaccaaaccaccgcctgtaagtgcatttgagtttcggtaactcgtcaaccaaagcaacataagagattgattttgtatagccacaaaactctgcaaaaaagattgaaacaaaacctgatgattaagagacaaattacaatgttatttataatgaaactgatgcaagggcagatgtgttggtgtaaaaacatatatatgaaaccgatcttcacgttcctctccatttaacgatgtggtgcttaactctacataacaaaaaaagtatattctcactgaaactctggaattgacagtttctcgtggatagttaaaataaaaatgcaaaaataactcacttttgtaattttatggtagaatgcctttgtaccttcgttttcttctcaacgtgtttatcttacatttttcgctctctgaacatgtcaaggttttgaattcgaagaagaaagacaatagagagattgctattgattgatccatccatcgatgcctctttttttttttttttttgtctaaaacatcaatcggtgactataaagatgaatagatcgtggcaaaaaaacgactgtgatgcgtggtgagagcgcaaccgtcgttcagtttagattttctgatttttgaatatctaattgaaaattagtatttctatttattttttaaagaataataaaagtgaataacaaaaaaatgaaagagcagaatttgagagttttgccacgtgtcagatagaggatactgcagtttttgttaaagtgactgttgatttagtattattagattaataattatttttttgtgttaataaataaaaattaatagatatttataaactactagtacaaaaattgatcgaaatataaaattttatggaatcgataaaattttgtcataaaaaaaatttaagtaagttaattttgttgaaagaacttattgagtatatttatgataaaattaaaaatgttattatgaaacaaataatgaaaaaatatttaaccttggatcattaaaattcgatgaacagacccgtaaaagatgaatgaaaaaacaattgatagaatatagctaaagtaaatataaagagagaatatatagaaagttttttttttttccttatcttaccaagtatgagatctattatttaagggagaagagatgtatatggcaccgataattttttttgtgaaagaagagtgtaagagaagaaatatatatatggtaaaagagtatatatacataatgatttataacattaaaaaaaatcaaaagtaaataagtggctagtgtgcactgcgtttttcggttggaccgtattgtaaagacctgacttcaatttgaaacgtggtctatgccttttcaacccttttttgaaatccgcagtttactttaaaaaaaaacactgatttctgaaaatgtgttgaattgtgacatatgtttggttttcaatgataacaaatgaaaaacgccaaaaagctttcctcattcactaccttaagctctgcattgtcagttgcggtttaattgcagataaataggctgattggtaactagtgttaattttggctgtagagactttaactgtaaaaaatttagctgcaaagaatttggctgtagagactttggctttgaaaactttatgtgttaaagtctgatcggcaaccgaaagctgtaaaagctgttaattttattatttattattatattttattattaaacaaatttaatatttaaatataaaaaattctaacaaatcaataataatttgaaatgtaaattatcttatcaattcttttcttagtaagttttaatttattttttctttactttttagctattgaatgattcttgatcgattattatgactaatagtaatagtctttttttatcaaatttttttttttgaatgattctctttggttgagtagttgtataattttgagcagtcaaaaacccattaaaatatatttcattagaacaaaaatagttgaaagtagaatcatttattaaaataattgaatgacataaataacgactgaattatacatcttatatagagatatttatatatgtatgtaatcattgacctcttatatttatgaattcggaagaatactaattctataaattcttttacactaacaataatggagatgattaaaacaaaatgattatttgttaaatggatcttaaaagaaagagaaaaataataataattaatttatcaaaacaattgtgaaataaaatatatataaatttgtaaatactttttaattattatgggaagaagaaaaaataaaattttctatatatttattttaacattgtatttgaagcttttaaaaataagaaaaaataaagaagaagaaataaaaaatgcctgtaaaaacttttttaaaaaataaagccaaaaaagtttgattagtagaaaaaaaactatagagactttaaaattatctcaaaatcctgaaagtcatgtgccaatcaccccccaaagtacggtgcggttcaaatagtaacaaaaatacatacatacacatatatataaaccaatttgattgttttgtgttatttattgtgtttttcttaatagttcgttgatttgtgtaatcgatacaactaaggactgtaaataaatttttatgttacggtagttaatcctcatataggttccgattggtaacaccacataattgcatatttgtagaaaataaaattaaactacataataaaatttgcagattaaaaatttgtacaatgaaaattgtgtcagttagactaaattttggaagaatcgcgggatataattttcaatataattatatttaaaattaatagtttcttatactccctctgttcataaaagaatgatgttttgctttttcacacaaattaagaaaagtagcttttgtattatttttttttttttttttgttaatttaataatataagttctacctctctcctctctctattggttattaatgaaaataataatactattaacctacaacatcaatctttgtggaacaaaaataaagctcaaaacatcaaatttcatggaacagagggagtatattttttcatttacgtattctagtttattcttaactattataaaataatatcacatatcattatagaattaacatattttaaatattattaaaaagtgatatattttaagggtgatttacaaaattaccttttttactactttttgtaacaatatctttttatattgtctatttttaaaaaatccccttctcttgaaaaaatgacccaattaccctcatctaatgagaacatgtaattggaaactgaaattttcctaccaaacttttctggcgccaacattattttttccgccaaaaataaaatttccgccaaattattttttttcgcgccaaaatttttttccgtaacaatttttttcctaaccaaaaaaatgcatttcaaaatccttgtaaagttttttaaaagctttgataagttgttaaaaacccttgtaaatcattttaaaatctttataaagtctttaaatacatatgtaaagactttaaaaccccatttaaaacctttgtattaaattttttacaatagttttacaagatttacaagagtttttaagaattttaaaaagatttacacggatttttaaaatctttttaaaactcttataaagtctttacaatcattttttaactcttagaaaaatatttctaactctttttgaaccatttaaaactcttgtaaacctttacaaaagttttttttaaaaaatacaacagttttaaaatgatgttaaaacccttgtaaatctttttaaaacccttataaatcttttaaaaccattgtaaaccatttaaaaatcttttaaaaacccttgtataccctttaataatttttaaaccattttttaaactcttctgaaccctttacaaaagttttaaaagttttgtaagagtttttaaagggttttaaaacccttataaatcttttaaaaatcttttacaaaacccttgtaaatcctttaaaacccttgtaaaccatttaaaaatcttttaaaaactcttataaactctttcataattttttaaccattttaaaacgcctgtgaacctttaaaagctttgataagttgttaaaaacccttgtaaatcattttaaaatctttataaagtctttaaatacatatgtaaatactttaaaaccccttttaaaacctttgtattaatgtttttacaatagttttgcaagatttacatgagtttttttaagagttttaaaaagatttacaaggatttttaaaatctttttaaaactcttataaagtctttacaatcattttttaactcttagaaaaaaatttgtaactctttttgaaccattttaaaactcttgtaaacctttacaaaatgttttaaaaaaatttacaagagttttaaaatgatgttaaaacccttgtaagtcttttaaaaccccttataaatcttttaaaaccattgtaaccatttaaaaatcttttaaaaacccttgtataccctttaataatttttgaaccatttttaaaactcttttgaaccctttacaaaaggttttaaatagatttataagagtttttaaagggttttaaaacccttataaatcttttaaaaatcttgtaaatcctttaaacctgttagaactatttaaaagtcttttaaaaactcttgtaaactctttcataatttttaaccattttaaaacgcttgtaaacctttacaaaaggttttaaaaagatttacaagagtttttaaagggttttcttgtaatttctttaaaactctttgaaaacccttatcaatcttttagaactcttttaaactctgtaaaaatctcttataaatctattaaaccccattaaaaatcccttttaaatctttttaaaccctttaattgttttttaaaatcctttaaaaatctcttgtaaatcttttaaagccttttaaaccctttaaaaatctcttgtaaatattttaaaaccctttaaaaatctcttgtaaatcttttcaacaccctttaaaatcccttgtaaatctatttcccgcaaaataaacaaaatttcacggaaaaatgtttggcggaaaaaagaatttcgaaattttgtttggcgggaagataatttggcggaaaatttattttggaatattttaggcgggaaaaaatcaatatttcattttgttaacctaaacgaaatttcaaatatgggtaaatggtcattaaaaatttaaagagggtataaatgaaaatggcaaatagattaaggtagaattgaaaatgggtaatgttgaaagggcattcttagcaattgttctatatttattgcaagtaattattttccactaatctctcaatacattaaaaaaaatctaattacaaaaaaatctattaaaaagtgataaattttgtaactaattaaataaataaaatatattgacgttttacatgcaacaatgaatattggttgtacaagtggaattaatgactatttaaacagttgacaaaaatggagttaatgacttgttgccgttgataagcaaccattaattgttggttgatacatatttgagttgtttctcttattcaattaaatacatgtagttgacagttttgtattgaaaaagtaagaaaataaatgcattatgaaaaaaaacgggtgaaaactactctctttgtttctaattatatgtagtttaaggtttttgtacaatattttaggaattacataaaaactccaaaataacctcaccttccatcttttctttcaatctcttacaaatcaaacctttttcgaaagtttaataaacaagtcaaaagtaacaattccaagttgaatgatcaatcaattattcactcacatcacgaatcccacaaaccagctatccatattttaattattgttcggtcaagatacacgttttaactacttattttttaagtacacacttaaaacattgcagagcaaaattcaaaatgtggagccaaactaacaaaatgaaaatttcgtaacaaaaattaaaattttgtgtttgagccaaactgaaaaaaatgattaaattttttttacacttttataatgagaataaacgactcctttgacagacaagaattaaaattacaatttccttcatatctttgaattttgattgaatcacccagttttaaacgatgagaggaattttgattttgatcttgaagatgagagggagagtctctttcatttaaacaaaattccagccaacgaagaagattttaacaatgagggtgttgagtttccatatgataatgatccaaacgactacgacgaacatattgccgatacatatcgaggtttactttatttaatttttgtttttagtagattatctcttttgttcttttctgctcattttattagtattacaaacaatattcatatattgatatatactgtattgttttgtttattttggccattacgtgtttcatgtccaaatgaatatgttttcatgcgttttgttttttttcttcagttttcatgtgtttcacgtactcatatgtttcacgtattcatatgttagcatggtaatgtgttttttttaattgtactcatgtattaaagatatgtttgtcatggttataatataatatgtcagtgtatttaagattatttttgctaatctataattattctgatggaaaatacagagatggctcatgttgatcaagtacataaactcaagaaagtaactcaaacgcagagagatggatgatttacaatgctctgatggagagaacaaataatggaaaatgaaaacatatgctacacgcgaagtctcctatttatttgagatacctatccatacggtgcaaagaatatggaatcgggcaaaagaaacttctaacaatggcgatgtcgatgttttccataaaagatcaggtaattgtagtcggaagcgaattccactctatttgaataaatttcttgatactcattacacaagagaaccactctaaggtcgctttgagcatctttgaatgtaagctctacaacattacattgacgtctcaagcaaggggttattcgacgtcatactaatgccattaaaccaactttgaaggaaaaaaatataaagaggagactctaattttgtttctctatgttggacaaatactttatctcatgaaccaaaatttatatgtacaatattgtgcatatcgatgaaaaatggttttatatgacgaataaaatggagaaatactatctacttctggccaaagaagagccatatcgtgcttgtcaaagtaaaaattttattgctaaagtaatgtttttggctgcgatggctcgaccaagatttgatgagaaaggtaatgaggtattttctggaaaaataggagtgtttcattttgtttctttggaactagctattagacgaagtaaacatagagatgctggaactctagagtggaaaacatcaactttggttaaaagagaggatataagagcttgcttgataaatcaagtcattctgagaattcatgaaacgtggccaaaggaaaatcggggaaagaccatattcattcaacaagataacgcaaagacacatgttgaatgtgatgataaagagtttgaagaagctgcgtcaaaaaatggctttgacatccgattgatgtgccaaccaccaaattcaccggacctcaatattttggatcttgggtttttcaatgccattcaagcgttgcaacataagacatgtcccaaaactattgaagatcttgttcatgcagtggaaaactcatattctgaatatcttacaacaaaggtaatcacatttttttttactcttcaataatgcatgaaagaaatgatgaaaattggaggatcgaacaagtacaaaatactgcatatgcaaaagagaacattcaaaagagaaggttgtcttcctgttaaggtaaattgtgatgcttcaatagtacaaaacgtgatgaacatgttagctttgacagattagtattaggaaatttttttttttttttcagtttttggggtaactattgtgcaactttttgttttttttttaaaacattttaaaaaactattgctatttatgaagttggatttttcttttcttatatatcgaccattgtcgttgtagttgtttatagatatttctatgaacaactacacaaaatatattgacaattgacaaactcagatcattctagttttaaattaaatactcatctacatatacaattacaagataaggaatggtcggttacaaaattacaacattttgcagccattttagcaaataaatccttaagttggaacttatttacaaggaatgtcatttgcattaattattatcatttaattaatattcttaattattaaaatttccttatctaatatatctccatcaattctaattacttttagaacggagaaatcttaggactttattaatattatattttattaaagataagtattatagttatttaaagtttataaaatgtttagaatatttaacaaaaaaatgtttagaatatatatactatatgaattctataaaattaaataaccatttcaaaagaaaacttttaaattgatttgaattataaatctcttaataaaaatattattagaacaaaaaaacaaaaataatatttaattttatcgaactggattagatggtaggacgtgtttagtatattataatgtatggattttataacaattaaataaccatttgaaagaaaaattctaaattaatttgaattatgtatcttttaaattaaaatattattaaaacaaaaagaacaaaaaaaatgtttaatttcactgaacggggttagatggtaggatgggtttgagtagacagtaacacgagacggtataccatgggtgaaatccattagatatgtttagtttcactgaacgggattatatggtatgacgggtttcggttgatagtaatacgagacggtataccacgggtgaaatcctagatataacaatcaaaatacgattatattatcttaaatactaaacaaaacaaataatattaataaaataaatataattaaaatttaaattatttaattataatctagattttaacttaatgaattgtacgttattgttcctatatttttaaaccgtaaaaatcaaacatagtaattgtatactaaataatatacagatataagagttgtatattcagaacatacaaaacattaaatcatatatattcttaatcgactaaacaaattaaatttttatttttaaaagaacaaaataattatgcggtgtaccgcaggttataatctagttctcattgatttcaacatcttaattccatttactatgcatttatgtgatataatttactggatattcaatcttcatgtcaatctatatttattactgtatattatcttttttgatataaaaaatgtagcaattatagttatatttccaaaaaaacaaaaaaaaattgttatatagcaattaattttgttaataccaactcaaaattaaaaaaatcagttgataatatgtcataattagaaggtattggtcgttaatgtggtgttaggaaaattaaattattctattttgcatatatctagattaagacttgttatcttatactagtattgtgttttaaaatttaattataagagatggacatttttagtacaatcaagatacaatatgttgtagtgttaatttcttgtaatgcaaatgtcaaagcagacaatttggcacggaaagtctgtatcgaaccgcatcatatcacgtatgtaaagaacattcctcaagaatggctttttgagttttatctaattaatatcggttgacaaaaaaaaaatattgtagtgcttacataattttcggaaaccgcttcttaacatattgcttacatagattacacccaaatgtttttcaaccatcttctacaggctgaaactctgtataacttgcaagcgctcttgcgaataagtctgccttcaaaatgtttagacttatgccaagaaatggctcagaaatttgagtcatagatccacatttcagacatgtaaacaaattgcatagggtacaccaatgtatttcatgtaataagccactagcaaagccacgaaaacaagaaagccaacgaaaacttcaacttctgcaacagtcggcatcttctctttttactttttttactttcaatgtatcagttcttaaagctaatgtgtttttctctaaaggtcttctgtagtcatatattgatagtgactttcttagctcattttatacagccattttatatatagggatcagtactatctccaaaatctaaaccaactacgacatgttaattattttatttaacgaatttcattatttataaacacgattctttcattattagtttttgtagcggaatttgttaattttcaaaatgataaaaagaagagagatgttttaaaatatataatatatatactaggtgttgatccgcgccttgcgaagggagaattatttttcaaaatctcaataatttttgaaatgaatttaattacattcacgactactattaacgtaaaaaaaatgttgaatgtttattactttggaatataatgaacaattcaatagaaacaattacttatgtgagtatcaagttgctttatttccattgcagcaaaatcataccacattcttcaaacttcatagcaaggagtgttgaataaattataatatttaaacattatgtattgtcaaaattgacaacattgagtttagtcaaatggtgatccctaatcatttttaaatacactattaaactgttgaaagatcgagcacacattaaaaagacaaataattgtgaatccaccaatgcaacgtatctcgtaatcttaacacaaacaaactattaattaatcaacattaaaagttcagaccaactacataaattcaaattcataccaatcgaaatatatagtaaattaaacaaattatctaaaattataattctaggagaagatatatagatgatagtatttattaaaaaaaaaaaagataatgcaataagccatccctccacaccctcgcctaagacttgttagcactagtggtctcaccaagaacacttgattgtctagttaagaaaataaataaaccaataatttggaaaaacaaaataaattaattaatttttgaaattctagtaaatagatataaaattttcacattctgttaaattcagcagctttcggaatattcagacatgttaccttgttaaaaattgttgtgttaattgaatcaaaagatatatgttccacacttccaccttccatagacgaaaaacacaaaccaaagacgtataagcacatgaattaaatacactaagaaattatgttgccatacgcccgaaaccaaaccatcgagcgttttccaacttgcattgcgtcgaggaaacaaagaagaagaattttagatatacaatgaacaatcttcccttgccaattcccactaaatcaacttttccacttgcaaagctcattcaaagcattcaaactcacatttgtctatgagtaacacataggtaagagaaagggaatacctaccaaccgacttactaatccttgtagtcctccgtaattatgtaacatgcttgacaataatataactattgtctcatcattcccatcatctctctgagcttcttgctcttctgttactatcctgcaactctagtgagtatatctctgaaatcaacatcccttgactttttgctttataaatcaaatttagcttatacgtgtgtacacatttctttgatgaatacaacattcttgtttcagatgatcttccgatttcagttatcccagaactaaaaaccaaactcagtgtcaccataccaatctattcttttgaaaaataatatttagtttttctttgttttttaaattatgaattatttttaattatatttttaccctaaacaaaatttcggtttttgcacaaaactcggacctaaatttatcgatcaaatatatactatcatattttatagctataaagctcaatcgacgagtaaaaatcatactaaatttagacaatttgtatttagacctatacacattcaattgagttcatacattaaaaagaaaaaaatccccaacatttctaaaaaaagaaagaaaaaaacccaccaaactccaaattatgtaatcccgtatgcatcaaaagcacagaagaggttatacatagaaattgaacatcacatttctcccatataaacgttattaaaatcatgcaggcaaagcgtacgtcattaacaggtttggtgctcttttcgtcgacaatctttctaatctcttctgcaatttcccagaggcaccaattcattgtgaaaatgtaacttgcgacttatgatccttcccactttacttactctttaaaaactttatcgatgtaatttgatgcatagagacataaagagaacgtccagggagactaaagaagggacgttacttaatctctccccttttcctaaaaatccatataaaaaggaaaccaaatacaaaaaaaacgacgtttcatcctcaaaactcgtctctatggtttaacaaattaacaataacaaaagacatctagagctcatcgtgagactcatcttcctcctcagtcgatgattctcctcctgcaccacctggtgctccgccagatctctggtaaactgctgtgatgattgggttacacactgcctctacctccttgagcttctcgtcgtactcttctttctctgagttttggttttcgtcgagccactccaaagcctctttcgtcgctgcttcgatcttctccttttcatctccttccaatttgtcggcaagcttgtccttgtcgttcacttggttcttcatgttgtacacgtatgtctccagggcattcctggcgtcgatcttctcctttaccttcttgtcttcctctgcaaactcctctgcctccttcaccatccggtcaatctcttcttggctcagacgacccttctcgtttgtgatagtaatcttctctgatttaccactcgccttgtcctctgctttcacattaagaataccgttggcgtccacttcgaatgtgacctcgatttgaggggttcctctgtcaaaacgagatcaggataattattttaatgttcaaaatgagactctgatttaccattactaaggggtaaaagaagtggaagcaaaccttggggccggtgggattccattgaggtcgaatttcccgagtagcctgcagtccttggtgagacttcgttcaccttcaaagacctgaatggagacggtagtctgctggtcttggtacgttgtgaaaacctgagatttcttggttggaataaccgtgtttctcgggatcaactttgtcatcactcctcctacagtctcgatacccaaagtgagtggcgcaacatcaagaagaaggatatctttggtctcatcaccgccttctccgctcaaaataccaccctgaacagcagcaccataggcaacagcctcgtcggggttcacacccttgtttggctctttaccttcaaagaagtccttcaacagttgctgaacctttgggatcctggtgcttccaccaacaaggacaatctcatcgatctggctcttctgtagaccggcatcatccatggccttcttcacaggtcccatggtcttcctgaacaaatcattgttaagctcctcgaaacgagctctggtgagtggctcagaaaaatcaacaccatcaaagagtgactcaatctctacacggacttggtgctgactacttagagctctctttgccctctcacattcccttcggagcttaccaagagccttgttgtccttgctgatgtccttctggtgcttcttcttaatcaacttgatgaagtactccatcaccctgtggtcaaagtcctcacctgcgcagatcataacaacaaaaggttaccaccaacatcacactaaaacaatccctccattctgacacatgttattgactatgtttagcttattgcattggcatagcaatcatttgttattgaacacaatgcaattcaaaacaattcattcctggtcacaagtatattacctcccaagtgagtgtcaccatttgtggagagaacctcaaacactccgttatcaatggtcaagacactgacatcaaaagtaccaccaccaagatcaaacacaaggatattcttctcgccacccttcttatcaagaccataggcaatagcagcagcagtaggttcattaatgattctagcaacattgagcccagcaataacaccagcatccttagtagcttgcctttgagcatcattgaagtaagctacgcaaagtcaaaaacaccaaataaacaatcaatcaccaaatacagataataaagatacctctccaccacatatataacaacaaactaacctggaacagtgacaacagcgtccttgattttctttccaaggtaggcttcagctgtctccttcatcttagtcagaatcatagcactaatctcctcaggactgaaaaccttagtctcaccatccttgatcttgacttgaatgtatggcttaccatccttgttcacaatctggtaaggtacaagtttcctatccttttgaacctccttatcctcaaatctgccaaatacaataacaaagacttaaaccaacaatatcatctccaaggtgaaacaaacacagagaataagtaattactttcgcccgatcaatctcttaacgtcgaagacagtcctctctggattaacagctgcttgattcttagcagcctcaccaatgagtctttcagagtcagtaaaaccaacccatgaaggtgtaatacggtttccttggtcattggcaataatttcgacatgaccattcttgtaaacaccaacacaagagtaagtagtaccaagatctatccctatcactgatcctaacttcgtagcctcttctattgcagaggacaacgcaaataaacatcctgaaatcgtaaagattccaatcgtcaataccaatcgagatctaaccttttaagatcgtgaaattgcaaacaaacacattcagatccaggaacaacgaaaaaaggttctgagattaagcaacaatgtagaggagatctaaatcggagaagaagatcggaaaatcactcaccgaagaagatgatcgccaacacaacggtactgttagctccaaacgagcgagccatatcggaaacttttgcgtacgatctctctttttgtttcgtctctatagatcgaatgaacttgttttgaacacagagagagcttccttttgttttttaagctttgaagaagaagctttttatggaagacgaagaaatttaactatgtcatcagagatgacgtggaccaattatcttacgacgatttgtaatgtcaaccaatcagatttggtcttgtgttggagtaatcgtggccgttggttacttcggttcttcttcttagttctagacaatgagcttttgttgggcccagtcttcttctattagtatcactagggctgcgaagaaaaacctaacccgaataatccaaaccatccgaaaaattggatacaaatctaaatttaaaagctgagaaattattttattggatcctaaatttttctatccaaaaaaatcgaatccgaacccgaatccgtattccgaattttacccaaaaatccagatatttactcaatagtttgggtattagttccaaaaaaagatctgaaaaatatagtaaaaaaatctcaaatccgattggacccaaaccggaaacaaatttagattttagatttatcctattgaatcctaaacttctcaacccaaaggatccttacccgatcggattttatccaaacccgacctgcgtacccgaatgtctactacccctaagcatcattgttaacaaagagaaacgtactatctatttttgctattgattttttaaaaagtatttgttttatatttattttgttatcatttaaaaaaaatattctttcataaatgagattatattatgaagaatgagattaacttaattagttctaatctaaaataaatagaaccgatattaaattttagaagcccaagtgaaatgacccattaaagcctttaatgattgaatggtatgttctatcctaagacatgcgtactaacatcttggtaaggagtcatgcgtactaactttaatttatcctttgaatggttaaaaacgtactgtagtatgcaaaagtgtgtaccgaaaaccaaaacaaattttaacaattttaataattaataacatatcattttaataactattacaacaatattttaaaaattataaatcaaaataacatattgacactactttcttagatatttgccatatattgtctatcttctctctcaacctcctcttgttcatttgagtcattttgctcgttttctatatgcattttcttcatcatatgcatctttctatcctctaaacaactttcattctctcttatcagttcttctcttctttgtcgcactgaatgttgacgttgagaacccacatcaagatttgcaaaacatatacgtatgattttgtaacatcctcgattcgggatgggacgtttcagatttcccaaaacttagaaggttctcgttgaaaacgtcccactctgtcgttttcttgcaaaaatataatattaaaaattgtaaccgcataataaaaaaaattacaaatagttaaaccatattaatacttaagaagattaatttacatgtatacgttcattacaccactcatttgaagcttcaattcttccactaatggtatctaccctaataccagtcttaccatgtaaaaggatccatcttttgtattgtttcttccactcatcgaatttgcatcttaaatctgttcacttgatgttttcattgaattttttgaacaatatatgctcgtcccggttgtcccggatctttaaacatgtaattgtttaaaactagtgtttcatcatataattcaatcaacgttctttcttcttcaagtatatatctttgatcatgttttctctacgatgattaattacaatcaattaaataacactaaaatggtaaataaattcaaaaaataatttaatctaaatatttttaaaatattaaactaaagttatgtgaattaaatgatacttgaataattaaatgaaacatcataattaaaaaaattagaatacaaataacaatttaaaataaactcaaatcatttaagatatataccattctacgaattggagagtcaatatcttcagtatttctattccgtcttggtgtggaaggatccatgttttcattccttgttcgaccaagtgacgccatatatatatatatatatatatatatatatatatataatcacaacaagaaaatgattaaattaaagatttatacaacaaaaatctaaaaatatattttcaaacataacaaattcaaaagatatctcactagttctcaattatctactataatctacactagaaaatatgatgtgaggaaataaaactttcttattaatttgagatgaaacaattcttcaaaacaaaaaaaaaaactcaatttgctgagatttaaagagttctaagagatgttctcggctctcttttttttttctttgggagtgaatgatttttttttgtgacttgttacaattattgatcatatatttacatggttttaaagagtacaaagaagtacaaatctaaccaatgagagacaagtactcagatccaactagttgattaaacacactttggtctgatttttactattggtatggagtttctggagcttgaaaggagtaaactgaaaaattgaaactaataatagaattgatacggcaagaagtttttttttgaagtgcatactaatatgaagttttgtagtccggagtgctgcatactaatccgatttgttgaatggtaaattagtccaaactttagtccggtccgcaccatacctaccaaccattcaagacctaagtataatgacgttcacgagtgagtaaaacatgagacggactaatgaaacagagaatgatgagagatgatttgagacttttaggagactcaaaatgaagcatctttgatggttggtaaggtagtttgaggtggatggttgctattctgttttggattattagatctaaatctcaaatcaaactatgaattgatttgaacttgttccggttgtagccgattgttgttctttgacccgttgccgtatattgaagcttggcatgtaatcaacaaaagtttttggcttgccatgaaatatatggttccaacttgtttgaggtttttttttgtgttttgttatgtaagttttcttttgtttataagttatatttaggtttttaaaaaaatattaaacttataaaatattaactgaatatagttggatgattgtgtgggtttcttatttttttttatatatttatcaattatgtattttttctaatgttgaaataattcgattgatgataataattgtaaaattcaagtaatagtattcctgtaacaccctaattttaggaatatgatggtgcatgcaaagaggtttaaaagaattgatttggccacctatgccaccaaagtgcacttatcttttcggttaaaggtcttgagagaactccacagttaagcgtgtttgggctggagtagtttcaggatgggtggcattccagaaagtgattgtcggaaccattcgagagaggacaaagcatggaaaaagatcatgtggtgatttctagggatggtaacaagtctttaaagcctcccggacgtggcccaccgatcgtcggacagaggtgggcccatggacccgagagagaatgtggggtccattagtaaagacggtcgggtcgttacaattcctattattatataaaggttaactcttcttttgggaaaagacaaattatgtctttgtaacaacaattatttttttataaaaaggaaaggaaattgcatcaaagtttaaactttaatttaaaactgtttgataagagaagtcttatttacagtaaattgccttttggtctcattatctttttccgacttcaattagtgttgcttggttcagtttgatgtttggtctctctagtgtgttcaatccctaagctgcatacatgtgttaaatatgtttttataaaatctactactaataaaagaaacaatttgaggcttctcaagtcatccacatcatcattccaaaaatcattctagaggatgccacatcagatttttttaaataccctctctaaataccatgtcaccaaattattaaaatataatattttagaaaataaaaaaaatataatgttttaataaatattaccggaaaaataggtgttgatttttaacttcaaaaacaaaagcaaattaaatgcttaatataaaatattaattttttggatttcaattaaaattgtttaaactaacaaaaaataatttaaaagaaatttaatattcttataatttatttttgagatgacaaagtccaatttttcaatgacagtttttataaattttaggttatataagtcattagttgacaaataagaaggtaatataatttattatcttaattaaaaatcaaatttaggtaaattacaaataactaattttgaaaatattaagaatctttatacatttttttttttgggccaaaataaacttcattcataaactaaagtggagctacatgggctcttaaaccggcctttgccaacgcatctgcgtgaagattagagtttctgggaataacattgaaagacatagacacaaacttagaagcgagatcaaggacatcatgtagaatcccgtgaagttccttagattgggacttcgctttaattgctttgatgactgccgtcgaatcagaagctaagaagaggttaacgaaaccaagctcaagagcatggtgcaaggctgctagaactacgagagattcagccatcaacggtgaggctacacacgatacatatcgagaagcctgaaatcccaactgcttcgtctggttgctgaaaatccatcttagtcccgccacggtagaatcaatccaagccgcatcagtgttgcagaagatcagatctggcgagaaaacagcccgtggaagggacactcgggaataggagcgttttacaagattttgctgtgccgattgccattctttagctcgcaggattgattgaagagctacttctggagggagcactaccttatctttgaagattttattgttccttgctgtccagatcgaaccaatcacccaagggaagatcggacctttgcctaaaccagtcaggtgtagacagaggagccgcttgactacatccaatccttgtctgaaagtactgatttggtttccgaatagctgactctgtaaaggtagaagctgccacacatttgctgcagaagaacacgagaagaacagatgtgacaccgactcattctccccacagaaaggggaaatagccaaaggattgatatgtctaagtttaaggttctctcccactggcaagacattcctagtagccttccaaaggaggattttcatcttgggggagctcttaagattccaaatctcttctttccatttgaaaccaactagggaagggtcaggctcattaaacaattcgtcccctgcacaagaagtatagtaaccagatctcgtactatactcccccgacgcattaggtaaccacatccacttacccaatcctcctcttttactgatctttagcttaaggatatcagtttcatgttcaagaatgattgatcttatctgattcaaatcccagtctctagtgataggggacaagagtgaagacaccagcgtcttttggtcttggatattgatcggacccattggactcaaaggagtagtaagagaaagccagggatcattccaaagcgaggtatgctctccatttcccacaatttttccaagattggttctaagcagatctctcccacaacagatgctccgccagccatgggaagaagacgaagaaacagtgcagttgaggaagctagacgtatgacagtatttccctagaaggacccggctgagaagacactccggcttggtaaggattctccaacttaccttagctagcaaagcatcgttaaacttagtgatatctcgtaaaccaagaccaccatctttaagtgatttataaagttttttccaggaaatccaagacatctttctcttctccgggtttgagtcccaccaaaatctggtaagggctgattgaatacgtttacaaaggtttgctggcagcttaaaacaagtcattgtataggtaggcatagccgcaaggactgactttaacattacaagcttccctgccgctgacagaagctttgaagatcagcttagacccctctgtttaattctatccactatgctagtgaaaagatccctctttttccttccaaacaattcaggtaagcctaaatacttgccttggccaccttcttttgtaatcttaagctctcgtttcactctttctctagtttccatcgaagtttttgaggaaaaagtaatggcagacttctgttcatttattttctgacctgacgcctgctcatatttttgtaggattcctaatagttctctacaactctgaggatcacacctacaaaagaacatggtatcatctgcaaatagtaagtggtttactctagggcttccttttgccactctaatgcctaataactttcctcgatcttgagcagatttacagaggccagacaaaacttcactgcagaggatgaacaaataaggggagaggggatccccttgcctaatccctttctcaggctttacaaaacctttagctgttccattcaagaggtaagcatacgagactgtagacacacattgcataatccatctgacccatttttcatgaaagcccatgcgaaccaaaacctcttgaataaaaccccactctaatctgtcatacgccttgttcatgtcggtctttaccgccataaaacacttaacctttgctcctgacgtttttagatagtgtaaagtctcatgtgtaatcagtacattatcagagattgcacgttgagagacaaaagctgattggttatctgatatgatgtgttgtaggactggctgcaatctcttggagagcagcttggagactatcttgtagtacacagaacaaagagcaattggtctaaaatcagaaacccttctaggactagtgatcttcgggataagacgcacatgagtatgattgatgtttgcaggcaagacatctgaagaaaagaatctttgaatctcatcaaccactttagctcctattgactcccaatttgactggaaaaagctt

SEQ ID NO: 1464 - DNA, 66542 bp, Arabidopsis thaliana
gcttggagactatcttgtagtacacagaacaaagagcaattggtctaaaatcagaaacccttctaggactagtgatcttcgggataagacgcacatgagtatgattgatgtttgcaggcaagacatctgaagaaaagaatctttgaatctcatcaaccactttagctcctattgactcccaatttgactggaaaaagcttgcagaaaaatcatccgggccaggagctttatccgcatgaatcgcaaagcaagctgttttaatttctgccgatgaaggggggggggggcaatgagtgattcattgagttcatgggaaatacaaggttgcaacgcttccaggactatgtccctacaaactgaagcctctgaggtaaaaatctttttaaagtagtcagcaatggttacatctatttaatcttcttcataaacaattagaccttcatcattttccatcactgaacaactgtttattgctttccttcctctagtagcagcatgaaagtagccagagtttctttcaccaagcgctaaccagagctggcgacttctctgtttccagaactcttcctctgcttggtaagctaagcttaattctttactaatcagctccacacactctgctgctaagtcttgtgaagacaaagcttcttcaagtttcatctgcagctcttcaatattttttcttactgttattgtgctgctctttattccattcaatgattgcagatcgacatctacttaatctcttctcaactgagtctagctgatttagattccaggcagacaacactagtcttttaacgtcctcattatctcttaagcgacgatcatatctaaacaatcctttttgtttcgtcttacaggatcaaaggaggtgacaataggacgatgatccgagccttcaaatctcaaatattcagatctccctgatgggtaagcttccacccaagagctatttgacatagctctatccaggcgacatctcactaagtggctatgccttcttccccgccaagacatgaagttgcctgagtatttaaggtcatacaaatcacattccgacatcaaacttctaagatttgtgaatgacccttctggtctggctggaccccctatcttttcagaattgttgatgatgtcattgaaatctccagttagaaaccatggtttatcaatatctagtctgaggttcctgatctggttccagactgctgctctcttctctctatcaggttcgtcatagagaaaagtagcttaaaaagctttcccttttgccttgatttgcgtatctatgaagtgctgacaagaggataaaatttaaacttcaatttcttgtttccagaataaaagaagtcccccagcttctggggcatgaggagacactaggaaatgtgaagaataacccatccaagcaaaggtattgatcacaaactcatcattgtttttggtctccatgaggaagaaaatgttagggaaaataccaagtctgatttccctgagtctatgaactgtcatggggttcctcagcccacaacagttccagctaataacccttaaggaaggggttttggtggattctgaaaatccacccctccctttttgattgcaggaatgatcttagtttttggtttttgctgttttgaccttccagggttatctcccgcttgggtggcaggatctcttgagccaccagatctaactggtgtcgaagcaacattctcctcactaggagggagggaactagccagtcctggttttcttttaggggacccttgagccaagaccaaattacgtttctgagattttgcacctgtcaggttaatagaacttttagtagcttgcttgttcagaggaggccgaccccttttcttttgaataattggagcctggaaagttgcctcttcttcttgatactcaagaggttccagactagctaaagttctttgaacagaggttgagacctgcagacctgcgttgccataagactcagcagcagaagcaataatcaaagcagcagtttccgccatcatatctctagattcactctgcatcactcgtgctctacgcgctgcactctcatttgggtcagcacacgccatatattggacagtaacttccctaagctcacccatcacttcttcagtggtaggaatcgggagtggaatatggctctctaatgctctgtgtactacaatctctcccgaaggacgtagaggcgattccaatcttggagaaaaaccattagtatcaagattccgttctagaggtggtcttctagtcctggaggtatcagagacttcttgcctctgtaaagatactgattttgacttctcacgccattgccaagaatgatcttcacgtcctctaacatgcttatcttttcctgggataaactctctagtctcccttgactgaaacttgggcacctggctcctggctttgctttgggagacttcatatcttggtctactatgggagtgaaagccagagttagatggagagttctcccgctgagtccgctctgcataccttctagtggatagagggcgattggagtgatagctggcagaactcatttggcgtggataaagttctctttgaccactacgatgatctttttggggagaggtagccgtgaagctagagccaggaggatctttacgggttgaagctgctggaatctgtttatcatttgaagcgtagagccctgggcaatctttcttttcatgagagagtcggtggcaatgaagacaatggttcttcaaattcttataatctaggtacaccataacctcacttccatccgcaaattccactatggtatctttaactaaaggctggagaccatcaataataactcttatctttgctcaagagggagtaagttcatgtccctgaaagatccctacttcttctccaatgtaatgaccatttcaggtttccagtaatgtagaggaagcccttgaagttcaatccagaaggggatttgagacgggaaggatgcatctatgactggttcccatctctgaaggataaccatccattgatcaatatggtaaggtctattagctaaaactttttgcaaatcctcttcaaaatcaaaccgaaattggaagcagccattgcctaggtctgaaccaatagcttttcccttaaggttccatctgtttgataggaacgggatgagtgaccagaggcgttgaacttttgggttggtaagtctccccatgacagtgagagcattgtaacggataagatctgaagtatctatttcgggggctcttattctcttctgaggaggtggagagaagtcggatgaaggaccttttcccttaagatgatatggtatgcgtctatccatagtcaaaccagaagagggaatcagtcttcacaagcttgtggtctttaagtcttccaaaaggttctttaccaaaaggtgagatagtttgcaacaaagttcaaagagagatttagtcaaagtaacggtaattttcagatctgaaatcgttacactttccaaccaccacagttcatcattacaatatgagaaggttcaagacagttcaagacatggcaaaaacaaaagaggaaacttctcaaaaaggttcagacaagaaggtacccgactcttgaagtaaatgttgaggtaagtaaaatactacttcttaaatggacctttgacgagagaaagcccttgtcttcttgtaataactactcaatagtttaccagatctggtggaagagcattcaaagcaggaggaaaacaatacagaaaccataacacaagcacagcccaccaaacttcaagaaaggagcactaggcctttttcacgtacggaggggcgtctcccacgccggactcctttgtgaaagctcgccggaaaagtcttcaagactgagttttccttagaaagtctattttgggtaaagaaaggtgggtgggaattgctgtttttagaaacaaagagtggttgagatcttgtttttcaaaaaccaatatcccaaagaggaacctcgataaatgtgcctgagagaaaattttttaagtttttccttttatattttaatgctataagaatctttatacataataaacacaataaactctttttattatataaaggattagatgtatgcagaattgaacaatatgctaccaatctaataatacaaaattagcttctacaaatatattttataaattatccacccattgagtttaaaacgttttctatacgtaatcccaaccaatgatccaaactcaacaaaaaaaatccaataattattcaaaacaaaacttcaaagaaaatgaataaataaaaaagttttagtgaaaacaaacccaaagtttattttgggttaagaaaaactatttatattacataatctttagtaagatagaaatcaaataaaaagtaattcagtttcattttaaatatcacaaagagatagtatataaaaatatataattcaaactaattttttatttatatatagcaattttaaaaatatgaactaaaaacaatacaaaaacataaataaaaattttaaaataaatcgtgcgtagccgggtatttattttagttattttgacagttgtatttatttacctttgatccatagtttgccatgtttttgtaatttatgtttgacatgttgaaagtgtgattcttgggggtataattgagaagatactcttatttgaaaaataaaatgcgtgactgttatattcattactcttcaaattttcttttttggtgttattgttattaaatattagaaaaaatcatttccaactttaaagtaatattttcttggtcaatatttcgtgttgtactaggctggtgtcaacaagctcgcagacttgggcccaaagggcaaaccgttgttcttaacactgagagcaaagaaatccatattgaaatgcaaagacatcatctagatgtattagccatatgatttgccaaactcatactcatctaaaataaaatgcagatgattttttcaaaaattgtaaatgtctaaaatacacccatttatcctcatgatttagtaaatttgtagtgatattaattttttataaatgtctaaacaaattaatttttagatgctataaaattttgtagttttggacttgaaaatttattttttcgaaaagaaaactaattttttagatgttataaaattttgtagttttggacttgaaaatttattatttcaaaaggaattttgttgacaataaagaacaaaaactatagataaatgcctcttatacaaaaatatacagaaattcaagtttatgattaatgattttagttgtttattttaagttttataagtttgttataacactatagaaataataatagtgcatatatttagaagttgaaaactttctaagcatttcaactatttttaacaaaagtgtagacagcactataatagtttaaaaatacaaataacaattgtttggtataaaacaaacaattgatgagttatataaatgattatcttcaatattatatagcttaagtagttaagttaatatatataatttaagatggattaaaaaaacaattttgtcaaatttctaaattatattaatatagtacaaacataaccttagcaaatgtgaatggtagagcatttctgaaggcatctccatcggtggtatctctcattgtttctcataattaaaataataaaaaaatagaaaagaaaggagaaagagagagaaacgtttctctgcccagaaaccttgaggtactctgacacacttattttgccacatgtattaattgtattggtgtaatctaattaattaatttaaatttatttgaataataaaataataataaaaataatatagtttattcatcatatatcctttttcagatacttaccaatgagaatggtctgagtatccaacagcaataccttcaatttctcaaatgatacaaaatgaaacactcttgtagatattgatacattcgtaaatctgatgtttttaataaataatatttccttaataaccttaccaaatgtaaatgaatgagtatgcatttgtatgaatacatgtttaatctaaagcctttatatattagactacgtaaggtttcttttagacttgattatatatagttttggtatatttgattatgatatttagttatatgctaatagttttaaacttgtactatttcacattgaccaaaattaatgggtgagtgcataaaatgttcaacttgttaggtgtggtgagttataatttcaacatttccatgacacacaagtatgacgccttgagaaacacgaatgaaataccagatagttttactagaatcgtagtatcacgcaatgcatttttgaatggtggtgtaattctaccaacaatggcatcaattcgatggagattcctgttattaaaagaaacgttgttgcaaaacttgaaccaattcctgaattgatggttacaaaaaggcagggacttacatgaatgattgatacatgctcaaaagaagtcttcggcctgagctcagcgtaagagataaagcatgtcgcagccagcagagtaatggtcataccagtatagtaaccaagacgcaggaggtgagcaatgatatccgtatttcttagaaattattgttttggtgtcagcgggctctctccttaggataaaaggcgacagatggtaataaagaaggcttatgaactggtatacttctctgattagttttatattggttttagcatgagagtttgttagagtatattgggtaagcatgaatgtatagcagtaactgaacttaaaagcaattgaaacaactagtcatatttcacttgtcttgggataacattcaagatgaagtaaatcgagttttttttttgtttagatgatagcttttacattcaaaatgtgttaacactccatgaataataccaagtctaatttgttggagcttaggttttatccaaggagaatgatgcgcatgacattcacctaaaaaactttccccaatctctctgtggttattagttccccacatctatggcacagtcattcttagaatggagaatttcgaaatctcagaattgtcttatcttcaacaatagaatatccctgatctcattaacaaaaggctatcgtggacctcaatgtttggaatgaagtggtatctttacaaaataaccaagatatccaaattaaaacagaatgtgggcaaaaacaaggagaaatctctacatagattgcacgcgttaaagagatgcttcatggagttcacctttccagcaagcggacttggttggataatgtataacaaaaaaactcgtgagattgtcagaggaagatctactgcgagcgccatgaagacgtctgctgaagctgaagcagaggcacttaggatggccttaacacaaaatcacaagacttggatatcaaggagttagtgatattgttgtgatatatattcacagtatgccacttatatgagggacatcaaaaacatggttgagggagatcatacctacacggctacacctttgtgcacatcccaagaaaagctcatgtactagctaaatctgctagactaatataactcagtacgtagcactgcatttaacattacaactctttctctgatgtaaacttagaatgcatggtacatgtcacttcttcccgtcatacattttggtattatttatcgcaccaattcaaagatcatgctctaaaactttttctggttcctctcctcgaaattctcttagaggatcattgcaaggagtataaaactgagccatgcagattctgagtctcatgatgtctgcgttgtatctggtgataagacgcaatcatcagaagcattcaaataagttgaaagtagatacttaattattagcgtaatgtgaatgagagccaaaactggtaccttaacccattgctttactatcggtgtagggtctggcaactttttgatgaggtcttcagcttcaggccaattttctagaataaacacatgcaacttctcggtttctcgtgcaccatgttgatggagattatctagataaaatgcagatttgctacatgcttcactcacaaaatcaataattgcttctttgggaagacaatcctcagataggtcagacttatttacatatatctgacagaggagtctaacacaagtccacactgttctaatacatagcttgaacaccatggaagcctgcaatgcaaagtacacaccatcatcaatgtggcggcaaaatcttctaaagataatatgcagggaaggattatgcaaggcaaacagaattataggtcactaagatatgcaaccttttctaggtgcttattattgtagaaagctacactgatatcgtgaaatgaagcaaataaaaatttgagctctggaggtgaaatccacggactagcaattacatcctcaactagacggttagtgatctgaaaaaaaggaaaccttgaggcaattggtttgcaaaaacaagagtctgaacaaaccttccactgatttgtgacaattgcaagtaagcgtttgacatctacattacgtagggttctcatggaaaaaataaaagcagccataaccacgtttagcagagtcttgtcaaagtcagttccaaggcattccttgtcaggggtccatctcgcaaaagggaaatgaaaggtaagcaaaacatttaacccagaatacatctgaaccgttacgcaaagtatttgaggacagaattcattcgatatttcttagacctatagtagagaaaaacatatgtaccttttaaggaagcgtaaaccataggaaaattggagaaacatatcctgcaatacacatagctgactagtataacatgcaaattctctttcctacatcaactttttcttctcaaaatttatcaagctggcaagcggttggcacaaaaatctcagaccatcaaggctaggtagagtgtattcaatcgcggctttgggtttagtttggactttagtattcttctttcttttagtggtcttctcaccaccgtatgtgttaatcataccaaataaagaaactaagcttttccatatatcagcgtcaccaagttaagctcgaagtcctaaactttccatggtttctttaccattttctctctacttaagatcaaatacacagacggaccgtccagctgaataaagtcttagaatcacatcagcttgtggtataccctgccaagaagtcgagctatcagtatatcctatcctataaccagtatgagacacaagtacatgttaaggaggcaaaaagatacctcagagaaaacaactgctatctcacccaatggtttcgaaactcctgcacaccatactacgtctcaaatataatttaaatatatttatataagtagtatttatgataatttaaacatttgctctacaatgagtgtagttgctggtttgttagtaagattcctcatttccttgtcggaaatcacaaatgttgcaccatattctccatcatgaatagcaagctccattaggtacctttttggagtttgtatcaaatagttagatttttttctatttcttataaatgttttgtgtttcaaattgcttaaataataacatcacaactttgttaatacctcagaattctctcctcatttgagaaaacacatttgttgcatcgtagaagtgttgttcttttctctaaattccgctcacaacctttgcaagatctgtatgtccatccatttgttttaaaaacgctgacaacatatgcattgtagagaaattcagcatccgaagactttttaaagtgtagtaaatatatcatgtttagtaagtattgtttttttctttttatgtgcagattagttttttttttgtgcagattaatttagtgactgtattgttttaatacatgttcgttagctttacaaatcttcagcgatcaaaactaattctttgttcctcactccctccatggtgtcggcatgtccatatgtttctcattcttctattctcatttatatggatcataaaacaattggttaaaattagtcaatggaatcgtatgtgcttgtttttgagaatattttgtaaatcttactcttttgtaaatttttggattgcatcaagagttgaatcaaaatatatccttgtggctgttgttgagttcaagtataggttacctatgaaaataaatcagaaattttattaatctatatgtgagtatgatgtgtattttttttttaatgatgaatatgttacctccaaagagttttgtattaatagttcttaccaccatgacattttctttgccccgttttgtgattagttgtgagcgaaagttgatgctgccttgtcccaaagttgtaagtagataataacatccgtaattataaagatatagttcgatgatgtgtaagattttttctaaataatatttgttatatatttttaaaattttacaactaaataatatttgttatatatttttaaaattttacaacacttatctatccaccttaaatcgtacgaccaaacaagcttttgaagtctcatcagcaaggtttggtcattggacaaacattatttgtccaacaacatctccaaaattaatattattgttgttttattaagtttctttatatttttaattggatacataaaatttgagtgtttacctggtaatgcaaggtttttgtttgctagagcttgtaggtggtcgatgttacgtatcttcaattttttttgttttatagttaacaaaaatagcaaaagcggtgatcggagaaataatgagaggaaatgacttctagatgcattgagtgacgagaaaaaagagagatacgaaagttaccaaaatgtcttggccaacccaaaatacgatgtgtgtcatttgataaaccagaaaacagcaaacgccaaacaaaaaatattcactaaaagcgaaaacactgacattgttccaagcaaagcgagcttcacaaatttctggccaagatgtctgcattttctgcaggcggatcaaacatatatctattaagagatgttgcaagaaacagagagaagtgaacccttatttctaaaaagtaaaatcacatcaattcataccaacagagagacattcttgccttcaaaaacccattgctaaagaattaaatcctatttccaatacgaagtttgaaaatttggtgaaaatagttgacaatttctccagcccacaacgccgatttggtgaaccgccgacaccatggacaaccagagttggtggagatgatgcgctaacagtgtgacgacaacctgatcttagaaacattgacggattacaaatcgttctgattttgctttttctcggcgttgtcgccgaagtgagagagagaggaggaagaaaaatcatgggattaattttttttacctttaatatttaccaatacaaccaataaaatgttgtcacgtcgctcccgcactaaacctaagagcgcctctaagctaagaactgctctaaggtttattgatcatttaacattaaatttcaatctttaattaacctaagaaacctctaaaattccccatgtaatgatgctcttacaactgtgaaaagaaagactaagaatcacttttgagttttgaaatatatatgtatttattatattggtcgtctaatgtggtgtttaggtcaacttaaatggcttaaatattaggagtatttgcaaacctaccatttttatactattcttttgtaacaatatccttatcgtttgggattattatgtttagcggaaaagaggaacatttatggcaggaagcacaagttgagcttcatgttgaaagccatgatcatttgaatttaggagctcgatctcgggtgagggatatctcacagcatactaactattcaggttttctttgttttgttgacggatcatggaaagaaagtgatcaattttccggattaggatggtgttgtacatcatcatcaggagagtcacctaccatgtgcgccgttaatcttcgtagaggtcgatctcctctatatacagaagtggaagctcttctttgggcgatgaagtatatgattggagaagacaaccaatacgtagctttctttacagactgttcagatttggtgaagatggtgtgttccctaaacgaatggcctacattcactttgtatttggaggaattgcaaaacgacaatgaagaattcacaaagttctctttatctttaactagataaggcccgcctatataagcgggtctaagatataaattttattgttattattgaatttcgaatagtaaaatagtaatcttcacaaaaattttgatatttaacttaataatattacatattctattttataataatttttattatacattttattcctactcactcaatattattgatgatatttcaattctaaatagtaacaaatactttttatatgtttaacttagtaattaaaataaattttcatctagcacattcaattttgctatacagtttaactatctatttcatcataataaattcaatattaactctacacactttatcttaagtgataacaattttatattaaaataacatttatatcagatcaaatctatatcttagtaaatattaaaaataattaacaactaagaaaacataattaacaactaagaaaaaataattaataactaagaaaatattaacaaaacaaatataaaaatttaaatcccaacaaaaaatgttataaaaatcgtcccgtggtgtatcatattatcatacatagaaaaacaaaatagcatgtatctatagatgaatttttgtttttaataaaaatataggcatatgatgtaccttttgactatgttttatatataaataatattaataaaataaaaatctttaactttctaacaaaaatatcaacctgcggtgtaccgcgggtcaatctctaaataatacaagtttaaatctttattaactctaaaaaatccttaccacaaaaaaaatactgaattataatattaaactaatatacactaatatcagaaaataaaacatgaattacccaagctttacatagataaaaattatgtatcaagaatatattattcttacaaaaatatatataactttttcaatgaacatatttacccgcggtataccacggatcaatatctagtggtaatgtaaagcggataacttggtgcagaaaattcacaccaaaccgtattatatcacatatataaataatatttcttggaattgtctcgtttgagctataattaatttcggatgatgataaaaaaaacaaaatcctatgatggttattttgttatcatggtgtttattccttaaagctatttatgtggcaatataataactgaaattatcatgtcaattaatgggcgttaagtattaaattgggtgttcataactaagctcccacgtgcatatatggatacctattcataactatatcttttcaaatattatttaatggaacagaattaaaatttcgtaaggttttgttttatctttagatagtaaattaatattccttagtacgtaatacaaacaactgaacttttttttttcttttttcactaactaatttacatatctatatatattgaattttgttttatgtataattctatactattttttggtcgtaatctcgttttcacattttttattgttaattctcccataattatatgaaataatatttttctaagtctacgttatttatttaaaaataaaccatagttatttaggtcaaattgccttaagaccactctctcaaataagagatcgtcgatagtacttaaggtcgaatacaacaaagtcccctgatcacacaatagactactgatgtttgatattaagcaaaaagaaatataagtaaagtaaaagacaataaagcagtaaattgagttgtagattcaggagattaaagcggcatgtatagggatggtctaaggaaatagataaattgtagatttagctaagattaggattgttattgaacctatttaggcgggcttaacctagtataatatgaaaaaagtaaaaaggagttcggaatcctctatgcagggattgaattcttctctccaaaaatatatctcttaataaaaacaagcttaggtctaaacaatgaccttttaaactatatatataaaaaagtctttaatctctaaaaccatgaattcaatatatatgagcttcattttccctaaattttacaactacatcctctcattactataagacatataagcattatccatatatttcaggtcttttctcattcttcccaatcgaccaaaatcatagtttcatttcatctacccttcctatccatacactttctttttaataaatcgttttttcacaatcttctcaatatgtatatgaatttttggtcttcacaattcgttctcgatagatcaatcgttttttttgtctttttgcaacctttcattgtgtttgtcttcattcccaaatctactcttcatgattctcaattgtgtgatccttatgcggaagtataaactctattttgaccaaaaatatttaacaatattttcctgtgtttagaggttggaggtatgattagtaggcttaattataaagttctcgttcaacaagaatactttattatgtgattgtaccgaccacaaattttaacaaatatgtgatccaattgttataatgtaatggctactaatgtggttgaagttgaaatattaacaaatttaatgataccaataaataattgtcgatgtttttccatttcttttattttcatagagaagtttaaaagattctttaatcttcttaaatagatattaatttttagaaattggtatacgttattctgatgggaaaatattttagggttttattataaatgagttagaaaagttataatcctggaaatgaggtttatagtgtatttatttactaattttaataccaacttcactcgatggttttgttttattaaaaaagtttgaatatttattaaattatattttactggtagagagtttagaagttgatgttgttacaatatccaatttttaaggttatttttatgaattgatagtaaaattttgtttgtgagtaataatatttattgaaatgtttgagatataactttgtatatatctaccaattaataatatatgttaaaattatcatggcaaatagttcaatttaatatacaactttaaaaaactctcatacaactattatgtttgtcgttctttcaaaaaataacatttacttaattaatatgttttacgtaaatttatctctttctttaaattttgtggatataatcatgtggagaaaaatgcaccatttgaaagattggaatagacttgagtagtatataatggacatggttacttctctcgttgccaattggttttgaggtgagagcccataaaacttaattggtctaacaatatttttgattaaatcccatgaaataattaagttgttgggatgtatcatatattaggtggagactttcttatcatcgtatgtgcaaatacaatattgttcttcttttctcctcaccttatcttagtttgtgctgcttttccaaagataacattctactgaaaaagtctttaatctctaaaaccatgaattcaatatatatgagcttcattttccctaaattttacaactacatcctctcattactataagacatataagctttatccatatatttcaggtcttttctcattcttcccaatcaaccaaaatcatagtttcatttcatattcccttcctatccctacactttctttttaataaatcgttttttcacaatcttctcaatatgtatatgaatttttggtcttcacaattcgttctcgatagatcaatcgttttttttttgcctttttgcaacctttcattgtgtttgtcttcattcccaaatctactcttcatgattctcaattgtgtgatccttatgcggaagtataaactctattttgaccaaaaatatttaacaatatttccctgtgtttaggggttggaggtatgattagtaggcttaattataaagttctcgttcaacaagaatacttcattatgtgattgtaccaaccacaaattttaacaaatatgtgatccaattgttataatgtaatggctactaatgtggttgaagttgaaatattaacaaatttaatgataccaataaataattgtcgatgtttttccatttcttttattcttatagactggttatatatataaaacttaacaaattaattactgagataactaattgtgattagatatttataatttgatgtagacacgcaaatagtttcgctcccagacgatactatcgaggaacaacttcgaaattttttctccggcgccggtggagttctctctcgtcggcgtcgggaactctctgcttctcgattcatttgcaaactctttcgatccctttgtaaccttttcatccttctagcttctctttttcaaatttttttttctcttgaactcttcttctccatgcataccttctacggaacttcagagatccttgatagaacatggtggtggttccccgtgagccatctcttagatctgctcaggtcgttggtactgaagtcggcaatagagaagcctctcgaatccaaatgttctctagccttgaaactcgagcttagtctcaaattctcatctaaatccttggagtttagatgcttcgcgaccctcgtcgttcactgccctcaccggaactctctgactgccacgtcggaactggcgatgaagatggcggtggaagggttatccctaaacctaatccagatgttgctcttctcttatgggcttagcccacaatttggaagtcaacttttaggcccacaaagtctccagtctcggcccaacttaaaaaataaagtctcaacctttttaccagactggcccaggtttgtttctccaaaattttctacaagcccactaaaattgaattgtctgcagtttgaacggattgaaagtggactctattccatctctgcttcgacaagttctttaatctggttttgtatcattctcaacattagcctggttttaagccctccttggcttctcatgttcacaaatatattccggtcattgctcgatgaaatattttctatgaagggggataaatttgcattcttaacctcatctcgatcgaggttgatagttagctcccggattggaattcatttggttgttcttgtctccaaggccttatggttttcatgttgaattattgttttaaacctatctatcattctcttgcaaatttgatctttgttattgttattgtatccaaccaagaggttgaagaccttgtaagcttttcttccttttggaaatgaatgaaatcaactatctttgcacaaaaaaaaaagatatttataatttgatgtgtagatagatagatttgacttaacttctcaaataaaatattaacaaaattcatgagactaatatagattattagtcttatccaaatactgcttcatcttgatgataaaaagatactcaagtaataggaatagtcataaaataaataaatatatatagtcacatgccatcattaatatagttatcatcgtaatcgattagagttgtcaccaattactaaattggcaaacacacatccatctttggttttctatgaagccttgaacgtaaagtacctacatggtaaaaaaaatcattcattaacagagttcaaattaacgattgtaatatatagattcacctctttgcttctcttgttcttttttttgtcatctcttgttatttttcttcaatataaaaaattgtttcaccttcctttaatcaacataacgagttgaaaaaacaagaagaagaatgtgcggaaatggttgtcttgagctaccctcctcgtcgtcatcatcatcatcatcatcacaaattgtttttgtttgtttcttctgctttctttccttcttctttgctttccgttttattttcgatattggttgatgctattaaactttacagtcatgaaagaaagaaaaaaagatcatcatcgcaaattgtttttgtttgtttcttctgcttttttttcttcttctttgctttccattttatttttgatattggttaatgctaataaattttttgtttattttttattttcccatgtataccacttttacatatttttttgtttgacaataattaaaaaaataatgtaaaagtggtttgcagcttctatatatatatatatatatatatatatatatatatatatatatatatatttaacatgaagaaacaattcgagcgttattgaaattgtaggatcaatcataccttgtaattgctaaaaccacaaaataagtagaaaataatatagtaaacaatcagcaaaactgttaaacaatattagtttatagtcaaggtagattcatagaaaaaactgttaaacaatattagtttatagtcaaggtagattcatagaaaataaaaccacaaaatacgtagcacagaaaaaaaaaattaaaaaatcagcaaaaatattaagcaatattgatttatagtcaaggtaagttcataataaaataaaatcacaaaatatgtagcatggaaaaaccaaatcaaagccgcatgagagtaaattcgtttgaaactgaatcctaatcatgtgttgaatcctaattgtgtggaagaagttcagtatttattctttaatgttttggacaaactatcataattaattttccaaaagttttacaaattttattggaaaacttctacttaagaatatctagacaattttctatattttcgaatatttctctgacttttatatattattttactatttataatttcaaaaatgttaatcaatgaaatgtctaacaatgattggtgataattataatatcaaaaatattaactaatgagatggctatacgcgattggttgtttaaaatctaatgtggacggcataagagacaaatagcctcaacttttatatagtatagatttagatatatgtggaagattaagagagtatatatatttctttttaataatagtttttgtggttagtaacgttgaattaatgtaatgatttagtatctaaatatttgataaatgtggtaaacttttaaaaatgttgttcatttattgaaacaaaatgtgtgtaaaataattcagaatgttcctcacataaatttaatggatttaatacaatacattctatttgttataatttttagaacacatttttcaataactgatttattattttagttaaaataatacaactattaaattatttatatgaattctaatgaggtaaaacaatttcctaactaaacattacatacagatcggatgaatatttatatactatttaaaaactacatttgtttatttaaaaaacatcaatacaatgtctctgagtgtttatttgtttttttataattacttctgatatgtcaatactaagtggtaacttcttctttttttatgatgtaagttaattgtttgtttttaaaaacttataccaaatggtgtaaattgtgttgagaatggtatgatgtatagttgttcccacattatgttcattgtattatagtttcaatatgagttgtaaggttttgcccaaaaaaaaaaaaaaatatgagttgtaaggtgtgtggataacacaattataaattattgtgtaacaaaatagcccgaatatatgattttacactcaccgttaattgataatagtagtattttttattaaagttggtgtcattattaaatattatttaataagcactatatattgtttattaatttttacgtctatgttttaggttttccgaataatattatatatttgttgattaataaatcacagtaatatagtttttttggatttttaattggagtatattttttgtttgtttaatttggatgtgtgtattaaattttctgataattattatgtgttgtatatttatttggtatgagaactctagtttgttgtattatccgagattaacttgtttagctagtagctaactatattagaaataaactttattatttgaattttgataaccaacaatcatacatgaataattgtttccatcaatttttcataaaagtttaaaagtttaaggttttgttttctttcttcttacatcatgtaaacaaacttgaccattagtttgtagtggtagcatttctcacatgtgttatgcatgttatttgagttacatatgtatggtggtatcattgcccatagtgagatgatataatcttcattccttataatcctgatttcataaagtgtagttttgatatttttccagcatttttcaactacagattcatttatcttctacagcaggtgctcaatatatgttttctcaatttcaatctctccactgcacaaatttatctatccatagagataaaaagcctcaatggtaggtgatggtgcatttacagcatttttgaaaaaatgtaacccatcagttgtattgttgtaataaaaataatcaagaactctttgattgtgcggtggggttaaaatggagtaggcatttcaccattagattaatgtagttctcaataggaagcaacaccttcctttgaagcatacgcaattccaattttttgaaaactttgacatcatcagccgagatttacgaattccttgcaagtgagtaggcaatttgaaacatcaacaaggggtttttggcctacattctttactattttagaaagaacatctcgagggagtgcatcaagcggtgttgaacgtttcagtccaaaaggttaggattgatggtgagttactatggatgctcttagtatcctatacattttgtgttgttcatccattacgaaaaataatagatattagaatttacaatatgaatggacactttggtaggtgtacaattcatatacacaaaatgatggatggaaaataatgatgagaatgatgtgcatgccctgtcactcgtacgtaaaagccttgagtgtggtaaatgttaggtttcccttatttatttataagagcattaaattgtaatgatgtctaacatgtaatggtgattgattagtattgtttagataacactttttttttaatggtcggtaatttaagtagtggcgaaaccgcacggtgcgatgttgtttcaattgtaacaaaaatatctacataatatatatgtgtatgtatatattttcgttactatttgaaccgcactacacttgatccgcagttgaaccgttcatcttcattcgaagcctagtttataggtgtatttatatatacattttgtttggtatattagtaagtgtacatatatatattaagtatttatttttgtgattgttattcttttttgtttttatgtttttttcatttgtgtcttatgcctatcatatggcttaatattgccgagtaaagcttttcatttttgtattaatgtatggtttgcttttgttgtaatcctaattgtttaacttttacaaacttgtgatcagctataaataaagtttaattatatgtttctcagttttttttatagttgttttgttattttctaaaatgttatggtaagaaatatcattttgctttccaaaaaataaaatagaagaaatgtaagaaattgtgtttttccgttgcatttgttttatacagagttgtaaaggactatagaagagcatcattttatcttagtaatgcatatttttataaatttgattttgtctttaacatttgctttgttgtcctcttttgttattttggaaaattgtatttaaaagtaaattttgttttgcaaatgattgctacttaatttgttcatattttgatttctcaccccatatataatgtttgattaatggatgtttaacaatattaccaatacgttgaaactactatatgcacagatatataatagaagagttggattttatttaaattaaaacagtaaaaaaggaaaaacatgaaagtaaaagaaatgacaaaaattattttactttgaggtttgatgatagttcaccgcctcaaacattatcggtgaaatttttaaaatcggttccaactctctaatgtgtttaagttatataataagataatcttaaccatttgtttgtagataaaacacgtttcacatgtattgtccaaatctattggatgacacacgcttggggatttcatgttgcaaacttatatcatataacaattctttcttgccatgtaaactaagctcgaccattagcttgtagtggtagcatttttcacatgtgttttgcatttcatttaagttacacatgtatagtgggatcattttctatagtgaggcaatattttctttctttctcataatcccgatttgacgaagtgcagttttgatatatttcctacattcttcaactacagcttcatttgtcttcctcagcaggtggtcaatatattttttcctgatctcaaactctccagtgcacaaatttatcaactcatagagataaacaacctcattgataggtgatggtgcatttgcagcatttttcaaaaaatgtaacccatcaattatattgttgtaataaaaataatcaagaacttatacgtattgttcggtggggtcagcatggagtaggcattttaccattagatcagtgtagtttccaacatcaagcaacgacttcctttgaggcatacgccattctaattttttgaaaacttggaaatcattcgctgagtttacgaggtccttacaagtaagtagacaatttgtaacatcggcacgagagttttggcctacgttcccaattattttagaaagaacatatttaggaagagcatcaagcggtgttgaactttttggtctaaaaggtttggattgatgatgagttaatgtggatgctcttagtttcccataatttggttggggccataatttgaaaataatttggtttatgaattagggtcacttaggttcgatccttcgattgaaagaattttcccaactacatttgtattaagtttggaatttgttattaaacaagaatagtaaatatgtaagcttaatttaaaacgatattgttactgttatatttataattttaaggtgagactaatgttagtattttgatattattaaatagaaaatcatatgtttagtaaatatttactaggcaatgcaagatttgtgtagggaaaacaaaccaagtgagcgtaattgtaaactctgaatttctccttttctatctttagccataattcatattccacaattattttgatatcaatgttgaatttgatgacaaaaggatggtccgtgattttggtatgtttggtgcatggcctaacttcgaacccttgaatttgtaatatcattccttcttggaaaataccattaatattttgagaaagtgatgtaggtatgaaacaacaaattaaggaattttgtttagaacgatgagaagttagatatatgatgagtatggatatgagatttccgttagaaaaataaattgatatgctagtcaatgtacaatgatacctttgttgtttatttcaagttcgcagattccgctatctagtgttgcgaaatcggtttcattgtgattgtattatgcggtccgctgatcaataaaatcgcctcactgcgggaactagtttggattacggaaagagatatcatatctcgtcttcactcgttttcgaaaaacgtctttctaaatagtttttataaagttctttctttctatttctaaattaggatttcgcgttccgacaaacttctcatcaagcaggaggagtgaatttccaaagaatacatgacggttgttggcggtactgaaataacttccaacatcctaacaatgcaacccaacatgttgggtgtgagttccaagttgtaaatcgtcaaatgcaacataggtaactagatttagattggggaaaatgtcgtttaactgccgaactttaccaaaaacgccattttatacaccaacttcgtataaggtcgttttaaaccttaactttgcgttgactttcatataaagcttgataattttgttgaccagacctaaatatactcgtcgttaaatctgatatcagacccattaacagccgtttagacccgtaaacatctctctgttagtgaccaaaactgcatcgttttcgacttaatcgaaaccccaaatccaataaaatcgctaaaatcaatttttgatcctaattctctgaatcttcttcttctttatcatttctaaacgcgattggaactccaattcttcttcatacccgaattctccatcttgagcgacaacaatgagttatatttctgggaattcgtatcctcgtattcaagacggaggtcgttgggaacgtgggtttccttcaaagtgtgaatgtggattagacgtcgtaatctatacctcggcatcgaagactaaccctggaagaccattcttccgctgtccaacgaaacaagatgtaagtagatttgaaattaagtttggtcttttttggtttcatcttaaaattttcgattgataatgtaggaccatttgtttaaatgggtcgaagatggtgtgtatgaaaaggttgcagacgctttaccaaaattctccatcattgacagtgagataaacaatgctaaatctgaggttacaatcgagattgaagtgttaaaggctatggtcgaagaactcaaggaagaaggaatgtggaccaaaagggaaatcaagaaatggaaatggatgagcacattgtctttggtgtgtcttggttttattgtcatggttcttgttcttggcatcttaatgttcggtaatatcaaaaaagagaaacttgttcttggttactagcgtgcattagctggtctttgtttgttgtgtctttgatgtttgtcttagtgttatgtcttttcttttgatgtttgtcttagtgttgtgtcttgttttgatgtttgtcttagtgttatgtcttgttttatgaagtatcttgtaatgaaacggtaatgaaaacaaagatttatcgttatagcaaaatctaagacacatgttagatagctaaacaacaaaacatgtcttacaacaaaaagcaaacaacaaacattcattggtccaagtcaaagcttgaaaaaccgaaaacaagagagaaagataataacaaaaaaccggagagtcttacgaacttcgccttgaacatttaaaccatgatccccatccagcaagtccttgtgattgtggttgagtttgtgctgccgatgattgtggttgaggatgtgcttgtggttgtgattgtgatcgaacatgagctcttgatgatgctctttgtctttgtgatccttgagctcttgcaccttgtgatccttgtgcttgttgcggttgtgatccttgtgatccttatgcttgttgcagttgtgatccttgtgatccttgtacttgttgcggttgtgatccttgtgatccttgtacgtattgcggttgtgatccttgaggttcctaatttagtggtatgttgatgagaatcagaaacagtagtgatttaatgattcaatgagtttttttaaaagaagtctaaacctgatttatccttggtctacctcttggtctcgatggtgacagcagaacagtaggattattacacctttttttgttgtgtccttcttgatggcagttagaacaggtcattattttccttgcccgtgacatcttggtctgatttgcagaagaggcagtttcatttcttcctttcctcctaggatagttacttggccttccggaattgcctcttctccaaggtgggcaacacatgcagcatattcaatctaggccacaatggcatcccttggacatgcataataccatccttgtacgtttctagccactttctctttatgtaatagtcacttacataatcttcaaccttttgtcttcttcctattatcacagatgctgcgtgtatacatgggatcccaaccatttcccacttcctgcaaccacaagttttaaggtccatatctacaaagtacccaacattattcacaaatatctcatgcaaattgtttctggccaaatgtctctcgcaccatgaagccccatcaaccattttctctttctcatcatgagctctcttagtgaaccttgtcttcaacttgtcaactatgagatacctctttgtagttctaaccatgcattgcctcctaatgtcctctagcatatcaaccaatggttttcttcttgcttgtctaatagtcctattgaaagactcactcagattgttgaggttatcattgcaacatgttccgattctaaagaaggctctagaccaagtcaacagactagtaagttgtagggaatcataagcatgtggattgtacgccttgagctcagccatatgattattgaactcttctatggtgtagctccgggctatcttccaaaaaaggcgttgtagctctagatcatggctgtctctcttccaattatccattatgtgtttacaacattgacgatgctcagcttgtggcagtatggtgtggattgctttgataagaccctgcaaccaaaacataaaaacatatgtatgagacatttatttcacaacaaaatataactataagattctataatgatactgattgtttgtctgaaatgatagctagatgagtcatttcaataagccccaaacttccagcgagttttctcaaaaaccagtcccagttatcatcattttctatctctacaactgcccacgctagaagatgacccttaatgtcccatttaagaaaagctccatctatgcctatgactggtctacaattttgtttccaagtctccttttgagatttaaaacaaatatagcatcgaaaaaacctctgtttgctcccaatcaatggccctggtactgtctcgatatcaaactcagtacctggattccggtttataacctctgcttgataataccaaattcttgcaaagtgggtttcatgactagcacttcttgctttcataaccttggtcttcgctttagcacactggtttggagttacttccaacttgtactctctctttatctcagccaccatctcgtgttttgtcagctttggattcaatctcaccctttcctcaaacaaggcagcaatcgaagaccgcttcagcatcttaaaataccctgacctcacacatgaatgctcattgacataaacttttatttgcatcttatgttttttcttctcataagaacaataaattctccacggacatttaacaccatcttcatcaatataacttcacttagctgcaatgatcatagatgctgacctataaagctttatgccataccttgtcttcaaagagtacatcaataatgcacgcttgaagagtcattcggagagttgtaggttttctctaatgctagcaaaccctctggctcgttttcatctctacgagttgtctcttcttctcctctaacttcatcttcgtcatcagatgacaacggatcaggaatcctgtcttcatcccatatatcatcaccgctgtcgtggtcagaaccgtcttcatcaactctaaaagcctcatgaaaatcttcttcaatgttaaggtttgcatcttcttcaaaagcatcgttagcatcttctccatcagcatcgttagcatcttctccatcagcatcgttagcatcgttagcatcttcctccacagcatcgttatctccaccacgtattgcatcgtcaacaccattgcagtcatcatcaccatatacggcacagtcatcttcgatatcttgagcaacttccaattcaggcttttcctcatatttttcaacgactcttcttcgttttcgactctgtctagagactcgacctccaagaacattgggttgagctaaacctccatcttctacagacagtgaggctactacacttccatctaccgccggtggacctccaatttcacatctcgctggatcttcaacttcagctgccgaattagagactcacattgttgtcccaatcctagatacaacgcctttgtttcgaaccaaaggcatttgtgaaagatttgtaattaccaattcgatttaggtttctgggaattagggatatcaagtttgagaattggggattttttgtcgactaatttgagtataagtgccgattaagtcgaaaacgacgcagttttgtcactaacaaagagatgttaacggatctaaacggctgttaatgggtccgttatcggatttaacgacgagtatatttaggcccggtcaacaaaattatgaaagtcaacgcaaagttaatgtttaaaacgatcttatacgaagttggtgtataaaatggcattttggtaaagttcggcaattaaacgacattttccccgatttagattagaggcattcatgagaaacattgtgcttttaagtgatatagaggaaaatgtttgtttgagtatttgttactaaaagtatttacaggatagaaaataacgtatatatagatgttttggtttttcttgagagatttaaagaccactttagtctagtaaacaacattacaatcaacgtagtctgttgtagtagagagtttgccttctttcatatatatatgattgtccatatttctaaattttcaattcgtttgagaaaaaaaaaaatacaattaaccaaaaaaagaaaaactgattatatgaagaaaaagaacaaaaaaaaaaggatgaaaacaaagagaatccagaaaaagaaagtgaagttattataattttacactgaaccaagaacaaaagcatcactgtcttctttacttttctttctctgcctttgcaatgaaaaattcctttagacattatatgatgatacgtccactctcaccctgactcaggctcaacctcagttttgatctaaaaccctacacacgtctcttcgtctcttcggaaacttgaatctgtaactaatctttgccatttactcataatctccattttctgattacccatttcctctcagtcctacacaacataacatccataaggccaccattacagtccaaacaacaaacaataagaatcttattaaggcttgtgatattatcagtctcactaaatattcgagaacacaccggaaaccccaaaagatacaaacgagtaagtggttagctacttttacctgacaaatcatacccagtaccgccccattcagaaggtcgggcatgtgtcatgtgcatgccctgaggtggtttcatcatgaaatgagctccaccacccaatgcactactagtaatagtatgatgctcatcgtttggatttcttccggaagattccatatcgggatggtagcccaacaaagattctgtaccagaaggagaaggtaacatgtttctacttcccgaagcatcatctcctttcgcaccatttcttccatccttctttttctctagctgaaacgtgccaagaaccacctgtacgggaaaccaaagccaagagcagagagactatccctatcaaacttggcaaataatcaaggaattccattttctagatttaggtgagtttgtgcacacatgtaaattaaactataagacaagaggaaagatacctggactggaccagcagcctttaggagtcccccaactcctccaccaaagatctgaccatctgaattagataaacaaacgctaaggccaccagttttacccccgtgctcgcaccgaatatagatccactcagtaagataatttcatactgaccctgaataaaagttcgtaattctgaagcaagttgatgatcgtatgcaattatcaagcatgtatgtcagaagtcaataaaattctttagctgtaaccgaagtttaattgtaacaaacagttcccaaaagaaaccaatttctttaacagagaatcaattcaagaaagccattttttacaaagtcagttcaagaactagtttagagggactagatagtaacaagagaatctcataagatacactggttcctgatgcaaggtgagacaaggatgcattagagatggagccagatgcagaaagaacacataactgatgcttgctttgctgagtgaaaagaacaatcttctccgccacatcctatcaaattaatccgcaaaacacataagaagacaacaaaatcaaatgcattatgaatacattcacagttttaaccaaatcataatctcaaaagaaggcctttagaatagtatgaaagaaaaatactcacctcaccaggagttatattaacaatgtgtggagtaaaacattgcccagttttccttggaaaaaaaaaatgtttatgtgaagctcacaaaatgacaacagcaagacgagtacaatgttgatcagttgatcttataacctaattgaatctttaacatgaactcagctgccacaagttttacaaaacaaatcaatcagcactagaaacaagaatctacgcattcttcaatgtgttcaaaacaaagtttctactccaatacattacgcatttgtaagcacagataatgtctatagaaactcaaatactatgaaagttacatagaaagaccaaagattgaaacttaacacaattcacatagaactcaaacagcaagaaagagtacaatggtgatcaaatgagctttaacatgaactcagctgccacaagttttaacaaaccaaatcaatcagcaaaatgaagcaacactagacacacgaatctacgcattcttcaatgtgtttaaaacaaactttctactcaaattacacatttataaacacatatgagtgtctctagaaactcaaatactatgaaagttacatagaaagatcaaagattgaaactttaatacaattcacatagaactcaaacaatttacgattcacatagtttattaattgaatctagaacatgaattcattaaactattggtactactgccacaagttttaaacaaaacaaagaccataaatcagcaaaatgaagcaatactagaaacattcttcaatgtgttcaaaacaaagtttctgctccaatagattacacatttgtaagcacaaagagtgtctatagaaactcaaatactatgaaagttacatcaaaagatcaaagattgaaattcattttttttttctgatctctttttgtttctcgatttattttaaggatttggaaataaatttagtgttatgatttgagcaatgttcacgaaagcgcgacgctgaatcggatcgtaggcgattttaggcggttaagccgtttataatacattggagccattcttcccatctactcgaccccctgctcgagtaacagcatctaagccactcgatgactccactcgacccgctggtcgagtatcactatgccacgccacctgaccaccactcggccattcactctaccacgttactcgaccccttgaccgagtatatccttcaccaatcatcaccatcactcgatcaagcactagaccacatcttcagagttgactcaaatccgcacttaaccagacaagctgagaacaaggaagagaagtggagaagaagaagtgtatggaaacggcctggagctccatcagatcaaaaagcccatctcggtccattatcactctatgggccgagcgattaggttactagcccgtctactatcattttattttgttttgtataaataggtgtccgagggttttgtcctggtacatctagtcgacattgagtttttgcttcagttttattttctgttttactctggctgcgccgcttttgcttctgcaacctgtaattcgagatttttccaagttattcagatttcgcatttgatttcatctatcatcttgtttctctactctttatctctttacttatgcaatatcatcatttatctgcgtttatgtctttgagcatgttgtctgagtagtgacataaagttcttaaggatgggatagaatagttgtggaatccttagtctgtagaatggttaagttttagaattgattgaatcccttcacgactagttgtgtttactgcttatttctttctaatcaactgaaattccatctaaagcattcccgcacccagaaggtgtttgatggaatgcttgatccactagttcatgagatattcgtctttatcccaagggattggccgtatagagcgtttattgactttatcagtctgttcttattgcctgcatagttagattccgttaatgggaattagtttgggctagctttgcttgaggatttctatcacgggattgaattgatttgttgttgaacatgttgtctagggatagcttgattgcgcttgttaactgatataacccgattttcactgattttatctatgttttaggtataggattttgagtctttatgttatttctcgacaccagtttcggcccagcaaaagtcctagacgctttcgagtttacagaagaggaaatttaccccagaagacttccctatttgcattattagtccctggacgtttttagggtctatatatattgtttctagccctagttttcattatcaagtctttcatccagttttcattatcaagttttctacaaaaccctgttactgagagacataagctaatcatcgattgttttcagagtttcattcagatcattaatacagtgaagagatcccttctttccccttctctatttactatgtttatgctttcacactcaaatatgttgtttgcttcatccaatatgtctgagtaatctgcttgttaggaatagggtttctcattagggattcatatggtttagtagattgttccctttgctaggttatctatagaattcttcatctttaattatgtttaatgctagatttagaataattaactagatcttgaatccagacaatagatatgcccgccataggtatctgtagttggatctattatttgatgagtctggtttataggtgtataataagaatcggcctatctactaagatgaacaattgaactcgttaagaatgcatatttaggttgatagtttctcggcttctccggttattataagctatagacatagggagttctgcggcacgcccaccgattattccataattagagtttgagtttaagaatggttcgataacaacctagctttcgttagatccactaacctacctttcgttagatcttttcctaatcgtttacaacccaatcatcctgttgttttcttggttagtttacttactatttcacttataccctactagctttatcttgacatttaactcattgtttgaacaaaagaactccgtgaatttgatcttaaaatactgcaattgatctcttatttgagagagtagttttaggtaatttgaaccatatcaaatttccccccgttgccgaagttcttgggaatcatcattgagttttgtttagagatttcgtatagtttttacttctattttgttacttacgcgtttcttgttttcttcttttccgtgtttcaggtgtatgcctaggcaaacaaggagcacaaaaaagaaggagcttagcaacttatctgttctggacttgggaaaacttgaatgcaccaaccgaaaaactcagaaattagcaattgttgacagagtcatcagagctgatatagaacgagttttgagagatgaggatgggcaagcctacaatgaggctggtcagagattggatgatcatggactcatcatacctgaggacgccaatgaggatcaagcgcgccacaatgcacaattagctgctagagatgcagcagggctcggtgtcgatcgacaccttcgggagcagaacgcggatgcaatcggtattgaatgacacaacagaggtgtcgatcgacaccaacaccagattcctgcagctattcctccagcagcggaaccacgtcgtactcttggggatttcaacaggccagacctgttctatgctaatcgatcagcaattgtacccccaccattccagaggaacgactatgagctgaagcctggctactttgctttagttggccaacatcctttccatggcttatctcatgagcagccaatggatcatatcgagcgatttgaggaccttgttctaagtatcaaggctaatggagtcttagaggactacctactgtgcaagctcttccattattcacttactggggaagcagcttcttggctgaaacaacttaaagtaggttccctcaagacttggagaagcatcaatatagccttcttgaacaatttctacgatggtgctaagtatgaggagttgagaaacaagctgtctaccttcacacaaggtccaactgaagctttcaaggctgcttaggttcgtttcaaggagtaccaacgagattgcccacatcatggtttcagtgaggtacaacttttaggtaccttgttcaaaggagttgattggagataccagatacctctagatgcagcgagcaatggtaacttcaacacacgttatccagctgatgctacagccctgattgagaacctcgcttgtagcaacagtaccaagaatgctgattttgagagaaaaaagattgctggagctatttcaggaaatcagatggcagaggtgaatgctaagctggattcagttcataacttgctcatagggaagaagcatgtccactttgtagctgaagaagagactattgagcctgagcctgagtcagaggaaggagtcttctacacaggtggtcagggatatagaaattttgggcagccacatggcaacttcagtggcaacaggtttacagggaaccagggttcctccaactacactccaaagcagctttcagaggacctttcctcaaagcagctttcaaaggacctatggtaattcagctgaccaagcccccctccaccctcggcagagagaagaattgaatcgatgcttgcgcaaattgtggaaagccaaacaaagcttgttgtggagtttaatagcaagtttgatgatgtctacacagatcttaatgggaagatcgacaatctgagctctcacttgaagaagctagatgtacaggtagctcaaactacacaatcgatcaagagacaaaagggttttcttcctggcaatcctgatgctaacccaaggaagagctgcaatgccatcttgatcagagaaggagatgatgtgtgggaggaattggacactgaagacgagttggagatcgtagtttcagagatggtgtcgacagacaccctcatgtgtcgatcgacaccatatgggacgctcttctcttagacgactcaatacgacggtgtcaatcgatacccctatggtgtcgatcgacactggatccggactgcaccctgtgaggtgcaaatacctatgcagcccgagtctgtctacactcctcctgtcccgtatccgaggaggcatcgttccaagcaggagattcatgctgctaagtgtacaaccataatggagaagatactccatactcttcctaaggatgcttctgagacatcttctccttcactcaacaggtatgtcaagcgacttgttgacaatggaattagctcatatgaagctaagctgcttaccagagatatcagtgcaatcatgttgcctaaggccaagaaggagaaggcacaaagagtagacatagcataatacatcctcattattactcctggtcagacaactgagaagcttccagatccaagtagctttgttcttgattgctctatctccacaagcagattatgccgctctttgtgtgatatgggatcaagcatcaacctcatgcctaagtctgttgctgagagactaggcatgactcactacaggcctactcgcatcactcttctcttcgctgatcgttccaagcgaatccctgaaggaatccatgaagatgttcatgttaaggttggtaactccataatccctgttgatttcatagtcctggactatgagaaggaacccaaggatcctcttatccttggaagagcattcctagctacaattggaactaggtttgatgtgaagagagagagaatctctctcaaggtttgtaatttggagatggagttcggcatggatggttcagagcttactaagcctatcagttgaattgcttccagcatagacacacctcctcagactgatcagaatcccaccatagagccacacaaaacgctccaacccgctcaactcgccaatgagagttgtaaagcaacagtgtcgatcgacaccactacccctgtcgatcaacaccctcgggtttcacagacagaggattctgcatatactcttcagcccacatcattcgaagacctatgtgataagttctcttctatctcctctcctgctttacctttgattaattctttagattattcgaagaatgcttcacaagataagaagcctagagtccctcgaaagcttgtttctcctgttgttcttgcaggtagcgagacgagtgtcgatcgacacatccctgattatcgatcgacgcccgcagctgccccaacctgatccgtttacacaccgccttggaaggcgaggaggcagcagcaatcctccaccactccacccacatcttgaactccgccaagtcaagctattgactcaaaacgagcgcttagtgggaggcaacccactggtttgatttttcttttccctttgttttattttcttttattttttatttaatttccacgatttctctggatttgaatgccactggggacagtgtcgtttaagtctgagggaggttcatactaatattgcttttaattttgtttcttatcatttttcgttttgcagttcatttggttatttcttttatatcattctaaaaaaaaaaaatgttttatttagtttagtttcgaatcatgatctatatttctcttgtttattgcctgattgatgagtgttgcagcttcgagtcaatccgactattggaaaatctagatggcaaaccaacaaacttgagaatatcctagtttccaactcaaccactaaagagggattgagacgactttctgattgtgtataggggtaccaatgtgataaaaagaatatgttcctctccccttataaaaaaaaaatataatgagagattgagacaactttcagatagtgtataggggtaggaatatttcctatgaccccattattatacattatttggaataatcaattacaaaggttggaaaaatgccgagggtgtcaatccagtatgcgagttcccctttgtttactctctaaaaagaataagtctggtggagagaaagaacaccgaaaaaggatcttgaatgttagcttgtttgatgagacccagcgatgaaagcctggtggatatagttggggaacttaggtatggaatctaaaatgttgtgtaagcttgcagagaagtacatgttgattaggatttgattagacttgttaggcatatggacttagtttggatgataatggtaataggctagagaatgttgggagttcctttgttttcaaaacctcttccaagggttcggcttttgtgttatgcttgagggcaagcaaaagctaagtttgggggagttgatataacccaattttcactgatttttatctgtgttttaggtataggattttgagtctttatgttatttctcgagtctttttaatgtcttttcagttattttatgcagtgggacaacaatggagataatgagacattttggagcaagagctaagggaaaggaagctaaggacgaatttggattcaggaatcagcgagaagtgtcgatcgacacactcttggtgtcgatcgacaccagtttcggcccagcaaaagtcctagacgctttcgagtttacaaaagaggaaatttgccccagaagacttccctatttgcattattagtccctggacgtttttagggtctatatatattgtttctagacctagttttcattatcaagtctttcatccaattttcattatcaagttttctacaaaaccctgttactgagagacataagctaatcatcgattgttttcagagtttcattcagatcattaattcagtgaagagatcccttatttccccttctctatttactgtgtttatgctttcacactcaaatatgttgtttgcttcatccaatatgtctgagtaatctgcttgttaggaatagggtttctcattagggattcatatggtttagtagattgttccctttgctaggttatctatagaattcttcatctttaattatatttaatgttagatctagagtaattaactagatcttgaatccagacaatagatatgcccaccataggtatctgtagtttgatctattatttgatgagtctggtttataagtgtgtaataagaatcggcctatctactaagatgaacaattgaactcgttaagaatgcatatttaggttgataatttctcggcttctccggttattattagctataaatatagggagtttcgcggcacgcccaccggttattccataattagactttgagtttaagaatggttcgataacaacctagctttcgttagatctactaaccaatagtttcctgagattaccttgttcctagttcttttcctaatcgtttacaacccaacatcctgttgttttcttggtttgtttacttactatttcacttataccctactagcttaatcttgacatttaactcattgtttgaacaaaataactccgtgaattcaatcataaaatactaccattgatctcttatttgacagagtagttctaggtaatttgaaccatatcattaaccattcaaataggctaggataccactctattcgattaccccatccttaggaatttctcgtctatctgatttctatgttttatcgttatcgcttaatcgttctcattgcctgtttcttagtttttgcaattactcgaccacacccaatgtctggcaacagactgtgcagtcgagtacagttgtctcgtttcctgcctgttactcgacctgttactcgaccacatcctgcttttggcatcagctagttgtggtagagtgatattagtaattttattataatttatgttttctgtatgttcgcttaggactgttagaaaccccaaaactgttattgcttggctttggcttgacttagtgacttctgatcacatctgatctgttttcatcacacccatttggatttacaacctttagtactacaacgacatgatagtgctttaggattaattgatcttaaacctattatcaatttggcgccgttgccaattgggtgcttatttgctatatttgagatttcagaattgttaagatcaagttcgtttttgttataagagtactaacattgtgtcatttcagactttgtatttcaggtacttagcaaccaactttattcgtctgttatagccaggttgctacctgtttcatgcatacacggtcacaagggaatcagaacttcctattcaacgataacatcgaccgtattgctcgccaactgagagaacagacaacaacagacacagtggatgacattgtagataagcaagagaaacctaacaacattggtgctggtgactttcctcacaaccacaacctgtgcatggcattgttccacctccagtacagaacaacaactttgagatcaaaagcagtctcattgcaatggtgcaagggaacaagtttcatggcttgccaatggaggatccgctcgatcatctagacgagtttgaaaggctctatagccttactaaaatcaatggagttagtgaagatggtttcaagcttcgcttgtttccattctcacttggagacaaagcccatctgtgagaaaagacactaccccagggatcaatcacgacctgggatgactgcaaaaaggcctttttggcaaaaaaattctccaactccagaactgcaagactccggaatgagatatccggattcactctgaagcaaaatgaaagcttctgtgaagtttgggaacgctttaagggttatcaaaccaaatgccctcatcatggatttaagcaagtttctcttctcagcacactctacaaaggcgtcttgcgtaagataagaatgctgcttgacaccgcttgaaatgggaatttcctgaagaaggatgttgaagaagggtgggagctagttgaaaactttgctcagtcggatgacaattataatgaagattttgacagaagcatctacaccagttctgactctaatgacaagcaccgtagagacatggaaactctcaatgacaaactagaaaaaatcctccaagtgcagcagaaacatgttcacctcatctctgaagatgaaccattccaagtacaagaggggaagaatgattagtgtgctgacagctatgttcagaatcaaggtggctacaacaaggggtacaacaattacagacccaacccaaatctgtcatacaaaagcaccaatatcaccaaccctcaggaccaagtctaccctcagcagcagcagaaccaacccaaatcgtttgttccttacaaccaaagccaagggttcgttctaaagcagcagtttcaaggaggatatcaacaacagcagccaccaccttgtttcacaccacatcaacaacaagcacctgcacctcaaaattcagatataatgactatactccagcaactcattcaaggacaagccacatgagcaatggaaatcgctaagaagctggctcaattaaacaacaaagtcgaccgacaaggtgtcgaacttaacaccaagttcgaatcactgagcactaggatgagatatgtggaaggcatcctcgctacaccatctgttaacaacaacctaggccagcttcaaggaaaagcaatccagaaccctaaggagtacgccactgctcacgccatcactatctgccatgatcgagagctgccaactcgacatgcctctacctctatcactagggacaatgaagttcaagaaggggaggattttgttcacaatgaaattccagctgatataacaatagagaagcccatactcgatcgcagtactcgatcccaagctcaagaagtactttcttctgttaaaaagcctcccgctgctaaaaccaaggataaagtctttgttcctccaccctacaagccttcactaccatttccagggagattcaagaagcaactgataaagaagtatgaagctctcttgaaaaaacaattgaaggaccttgaaatcacaatgcctctagtagattgtcttgcgctaataccggactcacacaaacatgtgaaggacatgattacagagaggatcaaagaagttcaaggaacgatggcgttaactcacgagtgtagtgcaatcatccagaagaacattgttcaaaaaaagtttgaagatccgggatcttttactctaccatgctctattagacaactggctttcagcaactatctatgtgatctaggagcttcagtcagcctaatgccactttctgtggcaaggaagctgggatttgtcaaatataagccgcgcgacctatctttgctccttactgataggaccttaagaaaaccctatggcctactagaagatatgcctatcaagattaatggagtagaattgcctacagactttgttgtgcttgagatggatgaagaacctaaggatcctctgatcttaggaagacctttcttggcctcagttggagcggtgatagacatcaaagatggaaatattgatctcaatcttgggaaggatataaggttactgtttgacatcaaaaaagctccaagaagatcaaccgtagagggacaaacctttggggtccaaggagtggttacagaagatggatttgagactgaaagagtaaaggaaccaagtttagctccaacacgaccttcaagctcaacaactcaatctagtacgctttgtgtagttgattggctagaacttaaaaggaagtctgatctccaagaagaaaccatccagaagctagcttgcactgttgaagaatttagggataaagtgagtcggatgcaaagggaagctattcaacctctactcggcattgaagctatatcaaagaagaaatttgtttcagaatggcctgaagaagaagactacccacaagaaataaaagaagcttacaaggaaaggaccattgagtactcaattacagacttgtcaagagagtatgctaagtccgatgttgtatctgctaaggaagaagagaagatttcagttcttctctatcaccctccttaagcctaatgagtgtgaggagtcaagctagaaacttaaaacaagctcacttgggaggaagtcccatgtctatctttgtacatacttttaattttccttgttgtttttgatgcattttgttagtgttttcaggagataagtatgaagagctgagggaaatggattttttctctgagggaacatcaatacactcgaccaccgagcaatcaaagacactcgaccttgttttggcttctccacgccaggaaattactcgaccgcggtgctggccgcagtagaagaagagagcagaatactcgaccacaccatacggggagcgaacaaagctgtgatcgagtatagttgacgcaatacgacttccccatgtcaggaattcactcgaccgcggtgatggccgcaacgaaggagaagagatcgagtacccacagggcggagctgagacacaacaaggagattcttcaatagactaggagcaatcacaggcagctattgacgaccaaatccgctcctttttcaactgaggtaagcacctcacttcaccattgtgttataccatctcctgtttttattttgtttctatgatgtgttttgtcctgagtactctcttccaaatttggtcacacagtggactgtgtgatttaagtttgggggagggctcaggaagtgtgtgttacattgtatataatcttgagtctgcattcatctaaggcatagaaaaaaaccaaaaaaaatgaaaagtttcaaaaaataatttcacaaaaaaaagagtgttcatgtagttgcattacatttaggatcgagtctagagtgtttcatttacgattcttgcatatgcataggggataatgatgagatagccttgtaagcattttggttcactagataaactcaatgccctcgttgttagttttctgatgcgtagtaaatgaaattgaagtaaaaatgcaccatgcctagattgctctactcgaccacactgtcatgatttgataccattccctatcaatttgaacatgaatccgatttaaaattatcatgtcttggcatcgaatttgaaccaattgatatcctaaaatacttggattttcttactcattttaaccactcttgttaatccaagtagctaactctccttattagagcagttaacccgaacttaaacctaaactttctctcaagccctatatcacttgtgagtgtttgtgaggtcttattccgattgagcttggtagaaagtgttaggttcgtaacgacaaagatagtgtctcatgtacttctagttcgtgtttttcggactggataggactaggtgggcgcttatatcatgggttgggatgtgtttaaaagaaagaaaagggtaaattcattgttgataaggaaaggaaaagaattctaggggaagtaagttaaagaagttcgaaaaaggtctagtaaaggttttgggaatgttaaagaaaagaatgaggttcttgttagctaaagaagaagggttaaaagcctttgggtttaaagatttaaaacaagaactttagttgttaaagaaacccaaatccgctagatgtatcaaactgttgagaaagcttctcccagagttaagagaaaagaaaagaatgatatgaaaaatggtttaaaagattcatgaatgcaaaaggtagagttaagttcttattttgggactggagattggattaccattagagcttcattgttatattctgggtagatgggatcttatctctgtatgtataacttgggacttacctttagcattctactaaagctcaatcattcttgagagatctcctgttacgtaagcttattttgtaagggacaatctttgtctcttgaccttcaccttagccaaatgagttcattgatgatgcattgcttgattcacgttccagaactaatgaatgttaaggaattggtagatttgaaagcatgtgtaggtcgagtataagagacggattgattcataacaagacatggctaacgtttttgagtagaattcgatcatatcgcatcttagaactgccaacttggacattgattttatctgctttatcagtgctttggttctgagtcaccaccttcaaacctctccttcagctatgtcttcttatttgcttgagggcaagcaaagactaagtttggaggagttgatatgtctataatttgcatgttttcaatgttcattcatcatcgttttgagtgtagtttcatattattcatcactgttttatatcatttcttatcattcttgcatactttgcatgattaggatagctttgcatacatattgcatttctgagttgttttcaggtgattgggagctgttggcaagcaaactggaagaagcgagccgaaaatagaggacatattacatccagcacaatactcgaccccctggtctagtgacataggagccattcttcccatctactcgaccctggtcgagtaacagcagctcagcaactcgatgactccactcgaccctctggtcgagtatcactacgccacgccacctgaccaccactcggtcattcactctaccacgttatccttcaccaatcatcaccatcactcgatcaagcattcgatcacatcttcagagttgactcaaatccgcacttaaccagacaagctgagaacaaagaagaaaataggagaagaagaagtgtttggaaacagcctggagctccatcggatcacgaagcccatctcgtcccattatcactctatgggccgggcgattaggttactgaaccgtctactatcattttatttcattttgtataaataggtgtctgagggttttgtcctgggacatctagtcgacattgagtttttgcttcagttttattttatgttttactctagctgcgccgcttttgcttttgcaacctgtaattccagatttttccaagttatttagattccgcatttgatttcatctgccatcttgtttctgtactctttatctctttacttatgcaatattatcatttatctgcgtttatgtctttgagcatgttgtctgagtagtgacatagagttcttaaggatgggatagaatggttgtggaatccttagtctgtagaatggttaagttttagaattgattgaatcccttcaggactagttgtgtttactgcttatttctttctgatcaacttgaattcgatctaaagcattcctgcacccagaaggtgtttgatggaatgcttgatccactagttcctgagatattcgtctatatcccaagggattggccgtttagagcgtttattgactttatcagtctgttcttattgcctgcatagttagattgcgttaatgggaattagtctgggctacctttgcttgaggatttctatcacgggagtgaattgatctgttgttgaacctgttgtctagggatagcttgattgcgtttgttaaccattcaaataggctaggataccactctattcgaaccccatccttaggaatttctcgtctatctgatttctctgttttatcgttatcgcttaatcgttctcattgcctgtttcttagtttttgcaattactcgaccaacttactcgaccacacccagtgtatggcaacagactgtgcagtcaagtacagttgtctcgtttcctgcctgttactcgaccacatcctgcttctggcatcagccagttgtggtcgagtgatattagtaattctgttataatttctgttttttgtatgttcgcttaggactgttagaaaccccaaaactgttattgcttggcttgacttaatgatttctgatcacatctcatctgtttgcatcacatccatttggatttgacacctaaaataatacaacgataagatagtgttttaggattaattgatcttaaaaaaacctattatcaccaaacattatatgaacagttataactatttatataaatataaacttagttgaaaactggataaatacactaaaatgaggtatatataattttaggcgggttagacggttgtctaggtgtcacataagcgcctagtcgggacctaacgaccgccaatacaactaatgtctttttgttgagaaaaagtgtgtttttttacagtatgtttttcagcctgaactattaaaaagtgtgttttttagcctgaacaaatgataagtattgatttatacctaaacacgtacattttttaaaaaactacatgaactgttgatatagtgtgtaattatgagttaacgttaatagatgttagtcaacgctaacgattgatgactcagctaacatgtgtgtattaacgaggcatattcttcaactaaaatgacctttttgccatttaaattcataacaacgggtttccggttcgaatccatttttacggttcttaaaaacaaattgatttaaaaatagcaaaacgacgtcattttagttgaagaatatgctacgtcaatacatacatgtcaggtgagtctgtaattattagcgttgactaaaatttgttaatgttgacttttaattaagcactatatcaactgtttaggtaggtttttctaaaacatttacgtgtttagatataaatcagcatttttcgtttgttcatgctgaaaaacataatttttaaatagtctaaattgaaaaactctcttttaatcattgtttttaagaacattatctattcatgagagtttacagaaaagaaaaaagataactaattaattattgatcacgtaaagtagcaaataacatgttaaactttagttacaaatttacaatacatattttcacgaaaatatattagacttctttgctttgttttgttttttgagaaatatcattccatatgcatagaaaacttgttatttaggtcccttcgaaatccattgttacctgaacactgttaacataacttttacgcatgtacccctatgttaacgttttagtcagttctaaagtataggcgatattattgcatgctgtaggactctacattttattgggatattgtgttcgggagttgtgtttctttttttctttttatgttttcttctctcctgttaacgaacattcgtctgcttttgttactatatgaagtagagagactgcgattgaggcggaagaacataaccctcgacttaaaaatttattgtgttatcaaggttgattttcaatagataacctctccttcagatctgggtttcttcattcgttttgggtaattgatttagttccccctctttgattttgtttcttcattcgttttatcttccttgtgtcttactaggatttttcgttttctatagacgatgtctccgattcctcttcctccccggttgattgctttcggcgaagaaccttgcggtgagagggtcaatgtttaccagaagtgaaaaccctcttcggtatattcaacgcactcaatgacggtgaacggcaatatttttgtcggtctactttcgctagactgttggagttttctaacaatcctgcttggtccgctagttttggaatttttattttgggtaggcagttggaggtggctaagtctaacgagatttgggtgctattcgccggtacacctattcgtttttctttgagggagttcaagatcgtcactggattgccctgtggtaggtatccgagtttgaagatgaagaagaagaaaggcactgcggggaagacgattcctttctacaataagtggtttggccttgaggaggatgtcaccatcgatagggttattacaatgttgaagaggagggttgtttcagatcctggtatgaggatccgatgtgcttgcttagctattgttgatgggtttcttgtccctacatctcattatcccaagattgttaagtctcacaccgaaatggttgaagacgtggatgcctttcttgcttatccatgggggcgtttcacatttgagatgattattaagtcgataaaagagagagaaattgaacaattagaaagtacttgttttgttgtttaggggttgttgtacgctttgcaattggtcgtcttacaagccgctccaaccattcaagatggtcatgttatcgacaacccaattgagtccgattctgaaggtgccgaagacgatgttgaagtggccacccgcgagtccgtccctttcaaactcgggaatgcgaaggagttggatgagaaatgttcggtaatgcttttaccctttaaccttgttaactgttagccgaatattgacgataaccagatcattattcactaagtctattttagtctagtaaggtacactagtttataacttatcgtttaaccttggtaatcgttaacagaatattaacgataacaagatcattattcaataagtctattatattaatatacttatcggatgttgttttgtcttgttttgcagattcatgttgcttcaatcatatgtcctgattatgtgttggatctggcggaatatttgtcttggtctgatgatgaggaggatgagagggttgaaaatcttctcatgttggtaaacgagggtttgattttcaagaacgacatatttgagagtggatgtttcccatcgcagttgcaattgacatctaaaaagcaaaagcgtggtgctaagtctaatgtttctcggaatgaaaagcaaccaaactatctaagaaccatggtggggttcggtaaaaaactcaaagacacatccctgaggaggttgggagttctagggttgtttctatggacgctatttctcgtttgttggatgcgaagcttgaagctcatgggaaagcaatcatttccgcggtgacagattgatttaccaaaaacactataatagaaggtgaccactcgaaggatcctgatagtgggtttaatcgtccgaaagagactgttcctactggtaatgtcagtgcatcaaatcctggtgatttggggtctaatgcaactaaggttgaatttggttttaatcctctccgaaccaattcacgttctcattgccctgaaagaacttctaatgttgaggcaagtgtggatgaaattttatctttctataattatatggtctcaagtggtgctggttgcaaataggcggaggtaatatgtcattttctaatctgttaaggttcctgctggttgtttaatattttctttatttttttttttttttttttgttgtggtgtagcgtgaggaagttattcctatggatgaagatattcgatctgagggcgacttcgtccataaacagcaggtgagcgaggtgtagattgatttatttggttaagctaacttatagtttagtagttagtgtacttatataataacatcgaaatttaacttcaaatagatagtcttttgtttgctctatgtgggtgttgtataactaacatagggagttaacaattttacagatgatgttgactcacctctatattctaatcctgaagataattctgaagttagtgatagttaaaatttcttagtaattatacagttatgttaactatgtttacgtgttagctgtctgaaattgtttttggtttcgctatagcgcgggaacaatgttccaattgatgaagatctcccctccgaacccagtctggtccatgattcccagatgatctatttccgaaagatactgcccatcgtacttaaccaacatagtatcctgtttaatttagtttaaacaagttgatgccgcccgtaatcatgtgtcattaatgtccttttttgagtttttttgtgggttaacaaataatgtgggtaatgggtttggtagggcgataacaatgtagcgactggtgttagtccaccaccacaagttgtttatgaagataacgtagaggttagcatctatgttgattacggattaacaattatcatactgagtagcaaattttttgtcgctttttcacgacaattgtaattgatgtaaattgtcggtaggtctctaaccacgattccgtccaagacgacctcgcacccgaaggggatgttaacgtggaaggggatgttaatgaggttagattattaatcaaatattgattttctaattttttcttttctagatttgatgagttttgtcaacattgagtttacattgtgtggaaccattttttctttttatttttaaagcggcctgatattatcccagtaactgaagtagtcacttctcccaaacattcgggtgacaatgaggaggttagctgttattcgtattatcaaaatcattatactcttattgatgtaagttagttgataacggctacctttttggagtataatatgataattggcctctaaaatgataattccaggtccagtgctttcagtagacaacaaccgatatggaccccttggcaaatgatttagagggaagcaaggtattatatctattttattctagtcagattttctagtttggcaatttcaaataatcttatttcttttttaatttaagcggcctgagattatatcagctactgaagcaggtacctctcctaaacattcgattgttaatgaagaggttagttgttattcgttttagcaaaatcattataatcttaatgcagtaaattagttgttaatgattacttgtttaagttcccgtgctctcagcagacagcaaccgatgtggaacccttgggaaatgatttcgaagaaagctaggtattagatttattttcttctagtcaagtagactagtttataaaaaactttttggtttgtctgactttattcttttgaatctttgttctctagggtgtctccgtgtttggcgaagattttgttggcaacgagacgtctgcggagttgccagatatcttggttagcagctaaattaccatcaatattgctatcttgtctttagaactcctttcccaaattcacttcttctctttctgtaaggattaatattggcgtgataacttattaggacctaaaatatacctttttcgggggttttagtttgttttcaacattttttttggtgttttaaaatattaatcctaatttcttttgaggtacttatattgataattgatttcttcacaataaccagcctaagttaaatagataagtttatcgcactaactataatattaaagttaatccattattacattgtttttctatgactattctttgtctcgaatacaatctcgtcgtggtctttttggcgtgaagtttagttatatccgtcacgattttactatagttattaagaatatccataaaagttttcaagcggaccatctttttcaccgggtttgtttatctcgtcttttacaaaactctaattaggtccctatgcctgctcatggcggtgttgttgggtatggagatgtggttgatatccccgatggtgtgtcggtagatgtgccaggaaccattgtcccggttagcttgataacattattagtatcgctttaacatatcattcgttgccaattcgataacttttgctattgtttctgtttttatagacttttggtaggagtgccccttctgctgtatcatctccccgccatgttatttttttttttttctcgtttactaatcaatttattacggagttaattttctctcatgtaaatcttcattttgtaatcgttcgtccgtgcaccgtggttgttttgctcaggattcagatgaggtaattcgtagttgttacgctgttattgctttggtgatccattagattttttattaatgttttcccatttcaggatttcacaactccacccccttctaaagaagcgatggctcccctccaggcatttatttatttatttttatttttttactttagctctggtttaatattttacattttttaactcttcgcaagcaggattatggcaatgttgataatgtcgagggtatgcgtgggagaagaagtaaaaggctttgtactctctctagcaagttagatggtcgtttccagtatgataagaaaacgaaattgttagttgggcatccatcccctgttattaatcaggtcaacgtcgaccctgaggagcgattcctaaactcattgaagaaactaaaggcgataagtttttttttatccagatttttaattgtttagtctatacattgtttgttattttatttcattcggggtaatctctcatgtaaccttgcgttctttacaattctattagcatttgtggtgggattgctctgtctaataaagacattttggacttaattgaccgcaagaaaaatctttcttccaaagtattatgtttgcggtatatatgcgtattaagttctaaattgttttgggcatttacttaaaattttcgtatttttgtcatgcacacaggtaatagatgctctcattagtttagtcgtcatttgttgcggactgatgatgtggacggcgagatacttcgtctcgaagtccttgattcgaaagtttgtttcattgttctgtctccaattcccaaagttttcccgatgcaactcaaaaacggagttcgaattctctttacctctaattgatattctttccggcgttggggaatctgaccgtgtgctgttattcacggaggctgattacatatatctgccttttaactttgacaaaaagcattaggtagctttagctgttgatctaaaatgccggaaaatcattgcattgtcttcgattcgaatatccaatgccgcaaggattctgcttttcaggatgagcttatgcctctcgcagcaaagctgccataccttttcaaacaagcagccttcaatcctcttatgagtcaatttcttctggatccattttctatacagcgcccttctgtcattctactggtaacttcacctcttgacacatgcatataatctagactttttattcatactcatgctatcggaggtgtacctgaatgtgtggatttcgatgttggcagccttcaaagtgaagtgaagaagctagtctccgctttaatccttgctggcggttagtagataactgatgtgttatcgaatatttttacatttgtgtttatgttctctcatcaaatcatgtatcctcatcttctttgttgggtctaactaggataatctccaaacgctttcgctatattttgtcttgtaatcatagttttctgaattgtgtatgttgttattaattttttatcttattaactaccgtatttggataacaggttatctggaattggtgattttattaatattttattaagagtgtcctgaattggtgagttgttatgagttttatctggtaaacgatcgtagcagataaacatgttatcaatgttttaccataatatgggtttcagatcctgtctaaacataaacacgcttatctgatagtgattattaaggttacttggataagaggttatctggatattaacaagattatcatgattcatattattatggttttctgagtctgattttattaacattttattaagagtgtcctgaattggtaagttgttatgatttttatgtggttaacgatcgtagcagataaacatgttatcaatgttttaccataatatgggtttcagatcctgtctaaacataaacacgtttatccgataatgattaacaaggttatcaaggctttatcatattacgggttctgtgtcttattttattaatatttgaatacaatcttatcttattagtggataacatactatcatatttatcgtattatggtttttttatgaacttcattgaaataacaatgtatcatgtaaaaaacgctagctggtccatgcttatcccaactatttatttagctgtcatcgtaacaatcttatcgagttaacattaatagcatgtaactatcatgtttatcatattatgtggtttctcttaattgcgtttaaatactaggttatcctgttcaaactgttagcagataatactgttatacttattaatcttattatgtgtttctgattctgatttttaatctcaatgtcaatttctttttgttaataaacttagtggatacacgcttaccataactatttgtgcaggagtcatcgaatatctaggaattaccggctactatttttgttatcagaccgttttattagtttcatgcttggtgttcggccttacgtttcttcaccgctgttattattttccttatctgataaatgttttatagacttaacatttatttccgtcactcgcatccttttgtttgtcaattaacattcctacttagaatgttcaataaacattcgttctaggaatctttaactgggacgacaacgattaataaatatgacattatattttaacattcctacttgaaaggtggatggattccgataattttacgtatatacatttaaaatttatgatcgcttaaggttccttatttattcacatcgccatggtattccttgtttatcctggcagcatccatcactttcttcgtcaaaaaacgtccttgaaccttttttctacggtccctgcattcaaaatggataatttaaatatcccataatatacatattaactgataatgtttgacttactagtattggtccattgcaggttgccctgttatgacccaatgacttgcatcgtgagcatctttttttggaggctctctacaaatggaaacgaaggttacatccttatagtcttaccatataaatattttattagtttttatctcacattaagtccatattttaccttgaattctccttttgaaaataatctttgtttccttggtcgctcaggcggtcgacgcacatacggtggagccagttttccaccctctatatcatttggtgaaggagtcagcgttttcgtgtcgggtactggcattatcagtgcttggtatgacaatctaagctcggggttcgtgtgatggactccaaccatcgtgttcacgcagattcctttttctatagccgccactatggcatgagagcaagggatagttaggagctggaactccctgcacgtacatgttctctcccataggttaactgcaaatgctgagtctctcttttctctaacctcatatagcccatccccaatctttagcacggcacattctgctcctttctcgtaattttcgatcacgatatcgtgcactttaggcaggaggatattatcctcacttttgttagcttgcctcctaagcgcaaaccatgttacgagtgttgtgcaaattgactataatatggaaattaccggataatctcgagccatagttaacacattgtttagcgactccgcaatattacttgtcatgacgttatacctattcccaagaaaatgggactttgtccaatgctcgaacccgataccttccaagtagtctacgtacggtccatgtttagctcgaacttcagcaaatatcctattgaagtcagttagtcgataagctttagctgcactcaatatcaagaaaactagctgatcgtatttaaagtacgcctcaatgttccttttcaggtgtacgacgcaagcagcatgagatgacatggggtaaacctgcgtaatgtttagataggaagctgaattttagaaaacatgaaatattagaggctaatttgattagtatgagataaactctatgttaccatattaccttacggatgctggcgtaaatagagttgtgtctctcaaacacaaacaccaactccggatcatctgttatcgcttctgtcaacttagtccacgcctcattgttctcgttgtttactatcccaaatgcaatgggaaacacctggaaatttgcgtcttgtgcactagctgcaactaagcatccgccatattgtcctcgtaggtgagtcccatcaattacaatgactttcctcatgtaagcatacccttgaacacatgcatgaagcgcaaagaacaagtacttgaacctctctacgccagagttatctttttcggtctccattaccaccagagaatttggatttgtctctaaaagacgcttgaagtaaggttggattaaagcgtaactccccataacagaccccaatgcattgtccatggcaatttcccgtgcccgacatgctttccaataggaaacgttgaggctgaattcttggcgtagcattcttctcagctcattagcgcgaggccccagcctactccaatatatttagtacggatcaactttccaatcacagccgttgaaacctgcttttggaagtctcctcttgcatccacgctatatgtgtgggttcgggtggtgcttctgacctccaaccgatcgctatctggcagcttagttgcataaacccgccatggacatgtgtcgctgacgcagacagccgccacgacattcggtcctgatttcgcctagatgaaatggaacttccggcgaattgcgtgaatcgctagtttcgttgcatagtcctctttgttttttaaatccgaccaatgtagatatcatctccctcataatcagcatcttttagggctcgatgaagagcatctgggaagcagagaaaacatagcaggtaatactttagttattgatagttagttatcgtgttaaacaaatgcttatcgaatacggtagctatagatagtaccgtgctaaatattttattatatcaaaattgctatatagctatgctttaccttccttccctggatcgtcaaaatatggtggggcatctatgtcatacaacactgtcggaaccagtgtatctttcacgatcaactcaatccttagtacctctgatatcttgtattggttgaacccgtacctatctccttagtagataatccgtcctctatcatgataccttttcctttatctgtcactgtgatgggctatggagccataatgagtgggccatccggttcagaataaaagtgtgacagtgttttgtcacctacagtcaaaagtaaaaaacagtgaacaaatggtaatagtgttatagaatagtaggcgataatatattaattatcagataacgaacctatgcgcgatgagctattgttgttggatgagtcagtgacttccattaggtcatcgctacagaatgaaatgcttgtggaaagcgaggttggcgttccgaaggttgaatcgcttgatgatacggcgaccacttgtgtgcaaacttcttgtgtttcaaatcttgctagagtgagtcgcaaatcctcatgtggatcgcccttggaaatgtcgccactcccgaaattaagagcctagcagttttacgagtgtcgcccacatttgttgcatcaatttgagttactcctagggtcatttgtgttgcacacatctctcgccacatttcttcttgttgatgagttcgccacatctcaaacaaacgatccctttctctctcatcatcatcagtaactttctcttttcctttagagcttgtaatggagtctggttgtgtgtctgttagtggcgttccgcttgtcccagctataatatccatgttgtctcttatgataaccccccccccctagacgtttctttggtcattgctacttacgcccatgttgttgtccttcccaatgcctgccagaccatctctgtcacctggatcaatatccgcaataacaaacttgttagtgtccttttgtttcactcgatatgaaaccctaaagtaaaaactcactcttacggaacttaacaataatatacgtaatacccaaagcttttacctttacctttcagtcttgatttctcggtgtgtttagctccttttgcattaaagttgtcggaagctaaactctttagtgtgatagtttttagtttgatgcagggaagagaatacagtgctaataaatagccaaacgtatataagcgatatactcgcaaccctataaatatcagcaataattcagaatatcttttatgtttccaataccgactaggtaaatcttcgattatatcttgggcattaaatgatgtcgtatttacactctaaactgttattggaggctaagctatttagatttggtaggggtaatttcgagagattttttttgtcgcagaggagagaggtcttatttgtgaattatcatgcatagttccttaattttacaatcttctgagcatagaaattaatataacccttattttttttgtacttaagcctccgaaaccactatgtgactaataagtaataattaaagaaatttgactctataaccaaaaaaaaattataaattaagaaactaacacatcaaaaaaaggaagaagatattatctatattttatgtaataaagacaggtttggccttggtgtgaagtacacgctcttcttcctcatattgcttaactcatcttcttctctttgtagctataaaaatatgaattggagtttttgtccagaaaagctaatgtcacaaaatcttaagcttttgacttttttttggtggtaggccgtgtaaagtctcgaggagagatagtcgagtaaattgccgacacgtcgtgtaggactcactctgattccgttggggttttaatttacagagacatgatcatatttttttactctgatttcgttggggttttaatttacagagacatgattatatttttttactccgatttcgttggggttttcgtttgttgtttttattgggttccttatttaacaactggatgttacttcttctctaatttggatttggatagatgaagtgtggcgacgaaatgccaatccataaatgttggagtgagatatcagaactatatcgggaaccaataaatcgattttgattttgagaaatgtttgagagatactattatattttgtgaatatactatttacgtataccttgtactatatacgttttaaaatgaattgtttgttttgattaaggatgttaagtgatttgattagtgttttatattaaaagccttgggttccctatatattatcttagggtttagtatcattccatcaaaaagtatttaattgattatttggattcatcggaacaaacgtttctatttgaacaaatatatactattttatctttatttgatgatatgtatagaatttgataccactattcattttttaagaaattcgtttccgatttttaaaattcaaatcatattagataaacaaaaaaaaatctgtattattaactttaactaagtaatattattaaactaatgtagtaaactagattaagagggtaaatgtattttaatcatataaatttctctttcctcttgtctcagacttctctttctctacaagcgcatctgtgggaaagagtttagtgtattttcacaactgacatgtactatcaaatgaattacacacattatactgctatatatttaataattttttccaaaagcgtcatttttgcaattcaccctaacaactatcaacccacggaaaaatattaattatcaaaaccaaacatgtatatccaagtccaagtggatgaagcaaattattattatatctaaagttatttcaatgattgtgctcgctcgaccaaatctcattattcagtttatacatgtccgactatttccaagtaaatcaatagtattatggaatgtaattttattttagtggttgattttttaagaaaataattatgcatatataaaattttagtttatgcaaatataatcttaaattgtacaatctacgtaagatgcaaagtagtttataacttatatgttctaattgtgttttgtgtttgcgaataggtaaacagtaaaccggttgttgtgtaaaaaaaaaaaacttgttgttgcgttctctttactaggttgcgaaattgagtttttgggtttgaaataatgtgaaaggtaaaactaaaataagcgatagattttattttctttttaccatttcttgtaagaaaatatatttagttgactctaactattagctaagtgaacatcgacattgcacaaaaaattgatgagtctttagcattaaatataataaaagttaataaaaaacagaatgaagaagtgagatccgtgtctattgtgtccttgggaagacacatttaacccatttgagacatcttaggtggcagcattagattaaattattaacaaattatagctaaagacattttgaaaagataaccgatgtggatggtcttatcgtagcattaaagcagctagtgatttgactcctttagaacatttgtttagattttttattttttaaatttggctaaacttatatattaacgtctgaaaaatacaacccttagagcctttaaattcatttgttttacttaaaacactaatttaattcatgtttgaaaaaaaaaaaaaaaaattgctcggtcaaggttgggtgaagtcaaagtctatgtgccaaaatagcgagtagccgagtagaatgattgagtgcgtgcatattatatatacatactacaagatgcaagtggtggaacataggtcgtgtatataaagaggtgaaaggaaaatttcaagaaggaaaacaaaaacgaaacacacaaagacaaacagagaaagagaatggaaaaacaattgtatcaaaccatggaggctgctcacatcgaacgaggcatagactcatcgccagaaaaggagatggcaaaaacacataagcatagaggactattccacctccaccaccactcaaaagatgagaaagatgaagacaaaaagaaagaaggatcaaagagagagaagatagctgcagcaatggttggtctcggagccacactcaagaaagttaagcatccacgccaccatggaagtggtggacaagaggaacaagaaggagcagcagaggaagaagaagtagaagaagaagaggaggaggaggaggaagatgatggtggagatgaagaagagggaggcaagtttagtgctttcatttcgatgatcgccgaagcatttgaagaatagaaattgtaatttgttatattttgtttattcaaacttgctatcaaatttagtatttgtaatgtttccttcttagcaaactttgtaatgttattttgatttgaagatttataaaatggtatatagttacatataatgatatttgttatgtatttgagtagttgtaaaagtagtttgagatagaaagtcctatcttttgttgtggggataagagaaatatatcttacagtcccgatgtgattcgaagtttgaagtttctaatttaaattttgaggctgacacaaaaatataccaacataaatatatatagttgagtatacatggttgacatttttagtttacatgtatgtatgattggtttttaatagtagctagtatgtatttgttataagataaaaacatatgaccaagaacgagttagtgtagtggttaagcctcttagttaccaaaaatataagaaggtcagagatacaattcaagttaggaggagtctgctcttcaaaaataaaataaaattacatggtctaagcctcgttatggaggatgtacggggccataacttcctagaaatcagaagaaaataaaacttatggcggcttgtcttttcttttggtaataaaagaaatatggcggcttgtttttttcaaatagttggatttagaaaaaaataatgcaagctaacacctcttgcgcgaccattcctggtttctaaattaggttccggtattaccgcaaaattttggcacgatgactggacgggtcttggtcccttaatcgacttaaccgcccctcttggaccccaattcactggtttgtctcttgatgttgtggtaagagacgttgttattggttatacttggagattctccacctctagaagcaagaatcatatcatcaacatgctcaaaaacattctaccaaacccggagaacatgattgagagtcagcatgatgactcttatctttggaaggctgaccatcatgctccctcaaacatcttctctgctgcaaagacttggttagctctctatacctttgctgccacagttccttggaacaaatccgtctggtttaaaggtaacttcctgaaacatgccttcatttcttgggtggtgacgtggaatcggcttcatacgcatgacaagttgaggaactgaggtttggtagttccggggatctgtctcctatgtaatcgtcatgatgagtccatggaccatttgttttttgaatgcagcttcaactctagcatttggagacacttcacctctagagcgagattgtctccatccacccagtttatggcttgtctccttcggcttcagtctgcttcgaggaacaagaatatttgcctcattgtgaatctcatacaccaagcctctgtgtacctcatttggcgtgaacgaaacattcgtcttcattccgccaattataggtgtgcttcctccattattaaggaaataaaactcaccatcaaggcaaaactagatcctttatctagggaacaacgatgtgtacctcctgctttatcacttcttgctacacagttctccctctttagtaaacccacctttgtggctcggttccatttttcttctccctcttttgcaggtggcttggtttctggagaagttttgtttcctccagttgggcatgtggccattttaagtgtttctaccatgtatgtttgggcatgaggcctctttaagcgtttctaccatatatgttttatgttttaatgaaaacttaaaaaaaaaaatatgtaacatcataagagcagcctcaacggtaaaatacattctcagtcccttatctctattattttaattatttaagtataatttcattatttatttatatttttagttacagataaaaaaattgaccaattatatttcaccacatgtgaggtggatttctcagtacagtaaagcaaagccttattcttaggaccctatttctctctttcctcttctctctcttacttttttaattaattatcattacttttttttgaagagacttattaaagctcaccggtggggctgctctaaggacgagttagcctagtggttaagcctcttagttaccaaaaatataagaaagtcacatatacaattcacgttaggaagggtctgttcttcaaagaaaaaataaattacatggtctaaaccaggtcatggaggatatacggacagcccataacttcctagaaatcagaagaaaagaacatatggcatatgacgacttatcttttcttttggtaataaaagaaatatgtaacagcataacagaatcaaacttgtgttggagtttattatataaacatagactgttattaatgtcaatattttgtatacatacacatatatatccatactgttaattggtaatcattgtaaactaaataactttatgaggtagtttattacataggatgcagttacaattttgcattccaagagtaaattaagtattttgtggaagggtactttggacaattggctgcacattgacacgcggatcctggatatgtggtcggaactatatccagtcatagatggataccacgtggatcttgcagtaattgaatttgaaattaatagtaaccatactaggcttacgtagttaaggccttcatgacgttctgcctcttaaagccttcaacgactcttatcaaaccatcatatctacaataaattcaaattaatgccgattctataccaaaagaacatttccataacaagcaaatctataaatttaatttaaaataatttgacttacaaatatatgtataccagcctaatcccatatattccgttgattctaacaaaacatatatcattaaagccaatttcagttaatgcattaccataccaagcaaagttataaatcgaaagccgaaataacaaaattcacggatattaccttaccaatctggtgtagaggcagaagcttaaaagagatgaaatacggctactctgtttttagacacaaaaacagagcacgtgtggtataaacggagaacgaaaccgatgggttcgtgaaagagagagagatggatcaatgaagatggagtgatggcgagacggaatcgatgcgagagtcctcctctcagggcttgaaacacaagctcttttgtagcaaaggctacgagttttctttattactttcaaatcaatgatgttgatacaaagacttgaatcctatttataacgaaaggaaaaagatacgatctaatcctaaatctaactagataagttattgagcttatctagtgtaacaagaaaataaaacgcaaaatcaaatgaaaaaccaaacttgttgagcacgtaaaagacaactccgactcttgtgctcaacgactctaaactcaaaggatgcgctgcatcacaatctaagcccatatcttccgatggttatgcaagacttatcattatagattcgacttcaattatgactttcgacagaaattaacacaatatctacatatccatgaattatttataacttttaccaacaataacaaactaaattatatggatatcggaccaaataaagcatataccttattaatcataatttagtaaatcctaagatatgacttagccgactatagattaatataaatataggattgagaatgccaaagaagatacatataggctgtttgtttggtcacgacagctacttgcggctgcggcaaccgcaggttatgctgttcttttagtgaacgcaagacgatgcggccaaatgctacggcaaacgcaagtagctgcggtgaaaaaccgttgacgccattttaattcagcatcaaattgcgatcgatgtggaaaatgacaaaaatgcccttaatattttttaaaatcacaaaaaactaaccctaaaacactactgcggcaaacgcagcttcctctctcaacaaatttcttcttctcttggtgatatcgatctctcggcgatttgctctggtcatcaccttcctctgttcatcgagcttcctctgttcatcgagcttcctctgttcatcgagcttcctctgttcatcgagcttcctctgttcatcaagctcctcttttcatcgaagtcttcaggtttgttttgtgagattgaaaatttacgatatgtgttctcttctcttgactcttctcttctattttgatcttatatttctgggttttcgttaaagttctctgcttagctaaaatcaaagtggttatgagaattttgtttactttgtgctcttctctttgaattttgaattgaggtcttttgcttctttttgtatttgaaagctctctgcaaatataaacagctttccctctgtagctatttcctccaagttggtttcaaatttgcctaagcaatcatccgtatgttaataatagtacactgcttcctgagattttgttagctaatgaatttagtataagagattgtagatggattaaaatcatgcgaccattgttaaatttgtgaagatggattaaaattatgcgaccattgtttccagttttttaaaatcatgtgaccatagtaggagattgtagatggatttttttgtatttgtgttctcttagcttgttaaatttgatctcttttgatctgaaagtttatggggttttttacggtttaggtatattcaatggttttagtgttgaaattgttgctagaaggtttttgtactttctgaattatagtttggttagcttgttcttgatgaaatttgagatcgaagcgtttatttattttagcttttgttagtttgagtgtcaaatggtatatgtgagtcatgctcgactcgtagctttcagtttttaacgaacatgctattatcttgcaacttagcattaattattttgacgaaatgatgcagaaattctcaaataaacattgcaatataatgattttcttaagtttcttaagttttgatgatttttctcaaaatcattttgtgattacatagctataaatgctctcgtgaccagaaatatttgcatgtgtgattgtctcatgtattgatatacaaatagcaatgttggaaattgatttatttttggactctgttcctcagtacctccaaccgaaggtaacgcctgagaggaatcaccagttaacggaatcagtaacggaggattaaatttatcaagccctagtgcagatgaatgtggataagacgccagggccagatggttttaacgcttgcttctacaagtaccattggaatgcaatcaaataaggtgtgatcagctttattcaattattttttgaaactggacacctagaccactatatcaaccatacttttatatgcatggttcctaaggtcgaatttcctattcaagttaaggactttagccccattagcctctacaatgttgcatataagcttatctctaagatcttgggagataggttaaaaccatggctgcattaaatagtctctgaattc

SEQ ID NO: 1465 - DNA, 145744 bp, Arabidopsis thaliana
ttattcaattattttttgaaactggacacctagaccactatatcaaccatacttttatatgcatggttcctaaggtcgaatttcctattcaagttaaggactttagccccattagcctctacaatgttgcatataagcttatctctaagatcttgggagataggttaaaaccatggctgcattaaatagtctctgaattccaatctgcctttatcccagtgcgtttaattactgatattgttattataactcataagcttctgcattccctttgcatcaagaaaatcaagaagccttttctagccttgaaactagacatagctaaggcttttcacaaaattgaatggaattatgtggcgtctattttgaaacgtcttggttttgcagatcaatggtgcaagttggttatgacctgcatcacaacggtgtcttattcagtccttatcaatgggaagccttcccaaaagttaatcccgcagcgaggtcttcgacaaggagaccccctctccccttatatcttcttgttctgtacagagggactatgatatttattaactcatgcgatgaactcacaacaaattcatggtttttaagcaagtcgaggaggccctcccatttcacacatgttatttgctgatgattcgcttctcttctgtcaggcaagtgaggaagaatgcacacaccttcatatacttagcacctatgttgcagcctcagaccatcatgtcaacttccaaaaatctgccatactctttggtaagaattttagcgctgagactaagcacagtattgcctctctcacatgcattgaaaaaaatatgaggttttggcaaatatcttggcctccctgaagtcatatggaggaataagcacgagagttggtacattaaattcttatctcctgttaggaaagcagttctcattaagtctatagtgatggctctccccacttattgtatgtcttctttcctccttcgaaaaaagaattattaataaagttacaaggtagattagacgctttcggtgggcaagttcaaaagagaagcaggagatacattggattgcttggaataaattaaccgaattgaaaattcacggaggtctgagttttagggatctgcagcagttcaatatagctctacttgctaagcaaagttggcgtatacttaaggatacgaattatgtgctaagccaagtgattgatgtagcattttattcaattgtttatcgaacaacaatttgcaatcaatcaactcaccaagaatacacacaattgcttaatctaagctaacaagatgattttgagtattctaaatcttagtaaccatgcattatcaagcaaacaatgcaaaacagagtaagaaaaaacaaaaagcaaaagactaacaagtttcgaaagtaaacaaagcggaaaattaacaaattactaagtgataactaaagacgaattctcgggttaaggcaattgattagaaatgataacgagatggattatggagtatcatagaacttctaacaagcaatgatccttaggctacagaacaataagcaagactaacacatttccatgatattaatccctttattaatcaatcaatcatccacaatttccaaaggcaatcaaatgatcaataagcacaaatgacaagtctatctagccactaatcaccctaatcaacaatttccaatagtaaggtatgaaaaacacttaaagattttggttcgagaaattcatcgaacaccttccgggcatgaaattcctagtgtctaaatcaacatgatcaaggttgatctagccttaatagcaaccaataagtaaggatcttaagtaatctaaccctaaactccataacccaatatctaaatcatcctaatctaccttaactaaagaactctaaacaactactcactcatgatcatgaaagcacaaaggaatgggtttgatctttgtgtaatcataattagagaatgtagataagagatttaaaaggtaagctttgattcaaaactcaacaaaccaacattcataccaaaaacttaagacaaagaaccttaagagaagtttttatctcccaaaacaaaagctctcttccctaaaactaggttaagagtatttatagtaatgagaaaataaaccagatcaacccggaacataccgggttttgacccggttgaggaaagcaatcgaccaagcaatagatcacttggtatatttgaatatcgtccgcaacattaatccttgattaatcgaccacgcaatcgaccactttggtatatttaaatttcctccatagctctggtcttgaccaatcgaccacgcaatcgaccattttggtagattcaaattttctccgtagctctggtcctgaccaatcgactaagcaatcaaccacttggtctattattctgcacttctcctctttggtcactttgaattctcttagatcctttgtttactccatttgcttccaaatctctaaactccactcatgtacctaagaaaaccaaatgcaaatgcaaatgcaatactatatgccaaaatataaaatgcaaagcaacaaaaaattaagagaaaagaggttttaaaagaaccaaaaacattagatatcaactcccccaaacttatctcttattagtcctcaagcaagaactaagaaataagaagagaaagagggttgaaggtggggattcatagccacaaaatatcaaacgaaggattcaactcaaagtatagttcaaatttgcttgaatcaatcatcatactctttcgtacttctccatactcttcttagtgcatagctctatttcaaatctccaactattagcaaagacttacaatctctttaacattcattcaagtgtttggcgcggtttcgcaaatggaagataaatcattctcaatcggttttggtgaaggcttttagaggtggtttcaaaagatttacactttggtgggtttgtctcaaaaaatagtaatcctagacaatcgtgaaatccatctaagaccgagaactacttatgcatacaaagtctagctcttgttgttcaacctattagaagatccatatgaagcccaatttagtgtctcataagtaatccaaaagcccatgtacctagggttagcaagatagtgactcatatatatattgttatgtaatgagaactttcattgtaactttgagagttgttttgagacaactttccttctcatctttatgaaagtatcaattgaattattgtgttcttggtgacaacaaattaatcttccctcttttagtttctttgagtaataaagctcttaatgagctatctaatttcagttttatatttctcttaataagctcatttgagcataaatatcattgctttagaaatgtcaacagtactcgccttagatgtaaactcttatttctacccttcttgcaaactcttttcttcttcttttcaacccaatcattagacactttggtctttttgaaccacaatcctcaagatcaatcctttcttgttagtcacctaggaaagacttattcttttcaacactttgctcttttctatctcttttctaagtttttcttcgttcccaaatacttatagctttgcaagcttcttttcttttggggaactaacttgatattcaactttctctttatacttagaaatttagagctttctttatttatgacttattccatagagactcctataaaaccattgatcacacctttctattcatttattttttcttttttttcccaaacccaattccaaatattcaatctaaccacttaaatctttcattcccaacctaatagctagtccaaagatgttcaaaaagcaagctaaaaacaagagctaaaaccttgtcgttctcaatactttcaagatttcaaaatctataccattttcatactagaggcctcactcacaaataattcataggcttgaaagaaaaggtttcaaggttaagggtagggaaaaccattctaaaggtgagaatggccattcgggttaacaaaagattggcaaaaagaataaaataacccgaatgagtcttttagactaccatgagaatgcatttaagatccataagcgagaaatcaatatcaaattaagtccaaattcatatagatatttcaaaagtcatgtaagtttcacacaagtagaaattgctttcgagaaacgcaaaagtctaatcatgggttttccattttttccatttatacgaaggatgatatatgatgatcaagcaacgattaactgtgatcaagggctttaagttcaatcctaatcttgaatttctacaaggtaattaaatcattatctcctatgcatatgcaaatgtaaactagatgctgctactagactcaatcctaaaagagaaaattaatatgcaaacctacatgatttttgttggatttttcaaaattttcagaattgttttttgatttttctcaaaacagagatattaccaatgcaagactcaaagaaataaaatcaaaacaaaacacaacgttagatggttagttagtctctcccccaaacttatttcacactgtctcggtgtgaaagaaaaatccgagaaaagactaacgaaaataaagaaatagaactaaaagaaataaagcggtatatacaagtgatacggtggagtggctaaggcatggtggagtagtctctcaaggcgttctttctcctagacgagtgtgatggagtggcgggtgttgcatcattctcatcactctccaaaatattgtctctatcttcctcctcatttgaaggaagtacaagctaatcctcggaagagacataatccggtggttggagcttcttcaccttcttaagtagcttccctattgcttaagattgccacttgtttatcttcctttgagacttgatgagggattgaagaaacttctccgtcttggtctttggcacaaatgtgaattcaggaagatcatacttgttgaggttgtaagggtcatctcgtggacatggtggcaagtcttctttttcaatctccataaattgctatacatttggtacttgatattcttcacttggcaaaaacataatgttatcatgactctctagatttgtgatctcttttgagggtagtatgcattccaacttgttatcctatctatccgtgtacaagtagatgaaagcatcattgctatgttttaaggagcaagaacgcaccaagttttcatagtcaatgtattcacgctttaggagagcattgattggagaaagatctactcccgctttaacaaaaagtggtgtgagagaaccaccaatgtagatgaatttcgtcttaaccttgataagccggttcttgtaatcctctagataagaagcaaagattcaccacccatagttcacatcatttccaagatcatcatagacaatcctttcgtcgccattcccatccgcatcttctaccaacaattctttgactccttgaaaaagaaagcacatctcggaaaccgtagtagaactcgtttcacctcccccaaaaagagcatgcgcgagaagcttcaaggtgtaacgaattaccagattgcggacgctcttgatacttgcgttacaactgaattttccgcttgctagcttgccccaaaggaagtgtattcctttaaatttcgggaagctcatctcgcttttgttctcaaatccataggcttcacaaaggtcgagaattgatatggagaaagccttcgttttgaccttgaagttgatgattccttctttagctagtggcgtctttgggttcttaaacgtgtacaccatggtgctaaagaaataatttgtaggctcactgaatgtagcgtgatccatggaggtgaaagcgccaagtcccatcttagtgaagaactcgtcaatagtctcgagcaaacccatcttctttaggatctcgcgatttgcaaaatgcgttggaaatgaaagaagtggagagatgactttgagagttttcttatcttccttagtccaatgagcaacgggttcgctttgcgattcatttgaggtcattgtcttagaacgtttggggtttcttctctttgtgcctcctaccattgtttgtcaatccgagaatggaatgctaaattcggattctatggagaaaaacaagtgaacaagagctttgaatcactaaaaaaaagcaaatgtgtttgaaaaagagagaaagtgagaagaagagaatcgtgagagaataaagaagaaaggaatatatatatatatatatatatatatatatatatatatatttttaaaagaaaatcggttttcgttggttatggggccaaaccgaaagatttctaattcaatttgagtgaaccgacaaaagtcaagagttgacttacctgggccttgaaaaccaatcgagcgattgcttggtcgattagaaaatcgacggatttgcggacatgaatgagtcgactgtccaatcgaccaacttgtctattgaatgctctattgagtgctcgattagaaatctgacggacacgctgttgtgtattagttgatcgttcaatggatcatgtcgattcgcttgcccagaaatggttttgcttgcccatcttgatatgaaattttccaaatactttcgtgaaactttatcaaaccaaaagcacacaaaaacacacagataaaataaaatatttacaaggataccatgggattgcctcccacgtgcgcttgtttaaagtcactaagcttgacgtttccacacaaattaggcggtttgaggttccaagagagaaaccgtagtttcctcctcaacgtgttcatttgccaagtaagacttcaagcgttgaccattcacaacaaattctcctcccgttttgttccacaataccaaagcgccatagggtctaacttccttaatcttgaatggacccgaccaacgagatttgagctttctcgaaaatagtctcaagcgagaattgaacaacaacacttgatcacctactttaaagtctattggaacgatctttttatcgtgaaatgccttagtcctctctttgtagattttggagttctaataagtttcaaggtggatttcatcaaggtcattcaattgaatcaaccgcttttcctcggcggttttgatatcaaaattcaaaagctttattgcccacaaagcctatactcgagctcaaccagcaagtggcatgattttctgcagagaagattgaacggagcagtacctatcggagtcttaaaggcggttctatatgcccacaatgcatcatcaagttttaccgaccattcttttcttgtagtcccaaccgtcttctctagaataggtttgatttcccggttagaaatctcaccttgaccacttgtttgcgggtgataaggcgtagtgaccttgtgcttcactccgtacttcttaagtaagctctcaaagaccttgttgatgaaatgcttccctccatcacttatgaccactctagggacaccaaatcttgggaatattattgtcttgaataggttcaacacaacttttgcatcgttggttggactagcaatcgcctcaacccattttgacacataatcaaccgccacaagtatgtagctatttccatataaagaaggaaatggtcccatgaaatctattccccatacatcaaatatctcaacctctaaaataggattttggagcatctcattccgcctactaatgtttccttttctttgacatgaatcgtacttcgaaatgaactcttgtgcgtctttaaacatcgttggccaccataaacccgcttgtagaaccttggagaccgtcttgaaagttgcaaagtgacctccatagcttgaaccgtggcaatggagcaaaattccttcttcttcttctttcgagacacgtctgacacatcttctatagatcttatctttacataaggtgtaaagaaatggttcatcccaatagaagcggtttatatctttcaagagcttcttcctttcataactagtcaaattcggcggttcttttccacatgccaaatagttagcataatccgcataccatggacaattttctttcaatctcttgacttcctcaagtttcatataggtctcatgacttgcatccaaaagccgaattgccaatagttgctcctcgggaagagagtcatcgattggtatatcattgtcaatcctcaactgagaaatgatccataacaccattctcaatccctttttttgtctttaatttccaagttaaattcttgtagaaacaaaatccatctcaaaagccttggttttgcatcgttctttgccaatagatgccttaatgccgcatgatccgtgtgaactatcaccttagaaccaaccaagtatgatctaaacttctcaaatgcaaacactatagcaaggagctctttttcggtgggtggcatacttaacttgtgcatcagaaagagtcctacttgcaatagatgacatgaaacttcttatcctttctttgaccaagagccgctccaaccgcatagttagcatcacacatgatctcaaatggtaggttctaatcaagtgcttgcactatcggggcgctaactaactctttctttatcttcttgaaagcttctagacatttctcatcaaacacaaaagcaacttctttacacaatagtcttgtaagtggtcttgctattttggagaagtctttgatgaatcttctataaaacccggcatggcccaaaaaacttcttatccccttaaccaaatttggcggtggtagattggtcatcacatcaatcttagctctatcaacctctatacccttcttggagatcttgtgacccaatactatccaaccttaaccatgaagtggcacttttcccaattcaacacaagattagcctgttcacaacgtttcaagaccttacacaaattagaaagacaagaagcaaaagagtttccatagacggagaattcatccataaaaacttcaaccacattttcagttagatccgagaatatagacatcatgcatctttgaaatgtagcgggagcattacacaaaccaaatggcattcttatatatgcaaatgtaccaaaagggcatgtgaaagttgttttctcatggtcatttggatgaatcgggatttgaaagaatcccaatatccatctagaaaacaatagtgggtgtgattagctaacctctcaagcattcgatcaataaacggtaaagggaaatgatatttcctagaagtggcattcaattatacacatcctatgtcccgttattgttttagttgggatcaactcgtcattatcattctttacaacagtgactccacccttctttgggaccacatgaaccggagaaacccatgtgctatccgagatcgggtaaattattcccgcatccaagagtttgaggatctctttctgtactacatctctaaggttagaatttaaccgcttttgatgttcaacggaagtcattgactcattctcaagatggatcctatgcacacaaagagtttttgatattcctttaatatcactaagagaataaccaatagcttttctatactttttcaattcttctattaaggtggagacctctaagttactaagctcctcattaattataatcggataagtagagtttgttccaagaaatgcgtaccttagccccttgggaagaggttttagttccacctttggagccttgagttcactccaatctccatcaatgtgagacttaccattgttagtttcctccttgttggtcacctcttcaatttaaacaacactaatctcatgactaccttctttcaacaaaggaaggttccatcttcattagaagacttgtgagaatcaagtatcttctcataaccctcactatcactttcaagtaaccaaaactctccttattttatagtcaaagtactatgaagtgcatcctccattgctagctcttccaaaagctcatccgctaaagcttccatctcttcaatatagaatacttggccttcaatggtaggcttcttcatcactttgttaatatcaaaggttaatacctcctaacccaagttcaaattaatctttcctcttcacacatcaatcattactcccgtggttctcaagaatgggcgtcctaagataagtgggtcttttggttcctcatccatctcaaggaccacaaagtccattggtatctcaaaatgaccaattatcacgggaagatccttaagcaaaccaaccggagttctaatagaacggtccgcaaggacaagtgagattctacaatctttatatcttgtgaagtataagtgtttggcaatcaaaagaggcatcaagctaacactagcaccaagatcacacaagcaatggtcaaaagataaaggaccaagagcacatggaagtgtaaagctacctggatcatcaagcttctttgctacaatcttgttttggatgatagtgctacaatcatgagtcaaaaggaccataccttgcaatgttttcttcttttctacaacctcatctttaagaaacttgttgtaagtcgggtttaacaagaacacatctatgataggcatggtgatagtaacttctttcatttgctcatcaaacattgctctatacttctctatttgttgcttcttgaaacgatccacgaatggtaactttggttcataaggtggaggcacaaatagagtctctttcttagaaaaacttttatccttcgtggagatttctacttgggttttgtcttctttagactcttcaacaattttacccttctctttgtcaataatacacttttcaacatcaatctcttcttgacaaactttctcattcaatacctcctcttcatcaatctcactcacaacctccttttgtttaggctcaatgtctctattgagctctccactcggaaactctttaccactattaagggttatagcatttatatactctttcggatttggttccggtttacccgataagttctcattagccgcttggaagtggatgaggattggctaaaaacatggcattcaaacgctttattttggcattgagctcaccataaatgtcatcaaccttggtgtgcattcctttcatttgcgtggcaagattgaatgctccacttccttgcccttctagaatttttctaagaagagtgtttgtatcatccgcttgaggtggaggattcgatgaactcccttggtgttggttgtggtggtaggcttgaggctttgtttggaagttcccttggggtttaggttgatagttgggttattgtgtgaaaccaggaggttttatgggtgggtacctttgatcttgtgggttctccacattagtgctcctatatgaaaggttgggatgtcctatagttggggttgaatttgttgtacccttgtccactaacatagtttacctcatcttgtccctctacacagccttccatgtgttcttgatacccttggtagacatcactcttggatacaaaatggatcggtttttgatttgcaagaatcatcttatctatcttttcattcaaagctttgatctctttgtggtgtagatcgctcatctcattactttctcttggagtgcggccataatcttcaccataattaccatcactttgagctagattctctaccaaagataaaccatcatcaatatcttggctcaagaagtttccattacttgtcgtgtccaacaacatgcgaaatttagggagaactcctttatacaaggtacttagtatagactccttagagaaaccatgaggaggacattgaattttgtatccctggcctggctacctttcccctatcccttatgattaaattgaactcttccaaagcttcaaaaaacctttcattgctcttttgagtgaagatagatatctcatttctcaaccttgtcgttcttgttgtggagaagaactttgaaaggaaggctcttttgcattgatcccaagaggtgatggagccttgaggtagattcttctcccaaatacgagctcggtcttcaagagaaaacaggaagagtataagtttgaatgcatcttccgagatcccattgattttcaccgtgctatacaacatataaaattggtttagatgatccaaaaggtcctctattgataaaccatggaacttagagctttgaaccatgttgatgaggcttgatttaatctcaaagttgttgttctcaaccggaggagtttgaataccgtttctatttccacggatgtttgactcatcaaaggcttcaattggttgatgagctcttggtggatgttgtggcatatgaccatccccattagcttggccatttattatggccttcaagtccgggttcatacatgacgcctaaccaagcaaggtgttcaagtctttcttgttctcttcttgctctaacattttctctttcaaactggcggatttcgctaatctcttctattaaatttgctcggccgtgacttcgtaggttcatatacacctataagacaagagcaaatatcaagtataaaggattagtaatgaaagtaaaaggcttagtctcaagcaaatatgaaatcctaaaggctaataaatattgcaaaccggcaacggcgccaaattgatgtagcattttattcaattgtttatcgaaccacaatttgcaatcaatcaactcaccaagatacacacaattgcttaatctaagctaacagatgatttgagtattctaaatcttaataaccatgcattatcaagcaaacaatgcaaaacaaagtaaaagaaaccaagaaacaaaagactaacaagtttcgaaagtaaacaaagcgggaaattaacaaattactaagtgataactaaagacgaattctcgggttaaggcaatcgattagaaatgataaacagatggattatggagcatcaaacaacttctaacaagcaatgatccttaggccatagaacactaagcaagactaacacatttccatgatattaatccctttattaatcaatcaatcatcaacaatttccaaaggcaatcaaatgatcaataagcataaatgacaagtctatctagccactaatcaccctaatcaacaattttcaaaggtaaggtatgaaaagcacttaaaggtaaggtccttaccaatcgcccattttggtagattcaaatttcctctggagctctggtcctgaccaatcgaccaagcaatcgaccacttgatctattgttctacacttctcctctttggtcactttgcattctcttagctcctttgtttgctccatttgcttccaagactctaaactccactcatgtacctaagaaaaccaaatgcaaatgcaaatgcaaatgcaaatgcaatactatatgccaaaatatgaattcaaagcaacaaaaaatttaagagaaaagaggttttaaaacaaccaaaaacactagatatcagtgattaaagctaaatattatcctagaggtacacttttggaaggaagcacagctcggccgcagaccgagtcatgagtggagaagcatatatcaaggtacttttcttattaaacaaggtctaaaatggcaagtaggtgatgggaataccatacgaatatggcatgatcaatggctggataatccggcaagaccaaacttgacaaactactagtactaaaccatatttaaaagtggtaggacttatgttgtcgtattccaaccaatgggatgagtagaagttgcaggcgatgatccatccagaagatatcttttacatttggaggatgagacccaagctcgtgtcaactcttgtatattcaggcattatttgccctaaaagacaagagccaagtctttccttttattggatggcgcatatggaaagccaagaatgatttatttttcaataacaatagattgctcttattgatttacgaatgtggaaggaggcaaatccttcttgtccctcgcatgctaacccgaaggacctaaccaaaatgaataaccctacctcttttcaggaagtgcttcgtcaaaccccctctcactgctgttatacagatgcctcgtggactagccctaaaagcaaagtggcaattggatggactttacacgactcaagtggaagatacatcctcaaaggctttgcctcggtagaacccaccgagactcaagaattgaaatagatatatattacacgactcaagtcaaagatacatttccaactggctgaggaagactcaagaaagagatacatattacttattcctatgaagttaaatgtattttcattgatgtttaaaggtatgaatatttttctttaaaaaaaagtggaatagaatggactattcttaattaatggtacctatataagagtggtgtcgcggtcgcacctatgagaattgaaatggctaaattctctagagctctcacgaagtcgggatatgttcaagaccaaaatgaacacaaccgtataaacatgaaatgagctaataatttatgtgtttcacttattgtctcggtttactatcaaacgtggttagttcaagacaagaattcactacccacaaagtaagtctgataaatgtttactaggaaagattcaagtctaaaaaacacttttaccgatgcatattgattctattttctcagatattgtggagcttattttctattcaaatgtagggtattattgagtttgaataagaaaatttggggtattgttggagtttattatataaaaacagactgttatttatataaagatattgtatacataaatatatatatatatatatacattaaaaagttacaaattatttacataactagaccactagttatgtaaactactaaacacctcttcaagagagatgtgtcgattaagaaaaaggcacatatacgattggttgtcaaaagcatcgcttaagtcaatagcatcgtttgagtcattatataaagacattacaacatagaggaagagaacgatagaaaatttttcttcttctccaaaatcaatttctgagaaactcaaagtaagtttgttagaattcgtgtaaggtattaatacagaaattgatagttgtatcctacaagatagacgcccatagaatctacttacaccatagtaggggcaaaattttgtctaaggagattacgatatcgcaagcctttataaccgtacgttcatttacgtaagaagaagagatcacaagtaaattattgttttgtaagaatcgtgtattaattcaataaacaaaaacgtaaaaacgtagttatatagatgtgtggtgatttgcatctataattctgagacagcaacttgttgatatttttataattgattgatcataccagcatgttagtaagatctacaaaaatatatagatttgaaggagaaacaaagaagaaggtaacgagaaggttgtaggcaagatttgaagcaatgtaggcaaatttatcgtcacataatagttttgtgtgatcatttagaactggtatgtaaaaaaacaaaaattgattcaaccaatacacccaccatattaggatacttagctttcgtactacttaattctacttacattgagatcttgagttagttttagatttttatgagataactattttaccaatgtgcatgcattcttaaatccattaaggcaaatctttaaatttttgtttatccaactactagtcgcgaagggacaatcgttcccaccgaaaaccctctcttctctctcctcaactcagatcgtagatctactttttttctcttctttctttttcaattaaagatcttcatcgtcgcttgatgggttggagggtgaaacggtggtgagcttctttcttctccgatggtgtgaggtgtggtttggtccaggctcattgcttgacggtggctctccttcacggtggcctgaaaattggttcctttgttctgctagttattgacaacagcggattggttcttgttattacggtttggcgatttgtgattgtacctccggcgagtagcggaagttgagtttttggatcggtgggtttcaccactttgtgaagaggttaacggtggctccttggctggagcctagatggctagttttgggtgatctttggccggatctcggtagttgatggattgtttgagccggtgtccatcagcttccgccgttattggcttcctctttgccggatatgaagattggtttagcttttgaagtagtttatgggagattgtcgaggcaaactgttggggtcggatttgacccaggatagcgagccgaccacaccgcctcgggaaccatcgatgaattaacccgaaccggaccaaaacacctcggagttctcgtcaagaatccataccgaggcgatatcgagaacgcttcgggcagtctcataaagtgatcccccgacccgacctcggaacgcctcgggaataagacttggaaaatcatcccgaggcgggctccaaaacacctcgggagcctgccttcaaataccgcagaccaagcatctcgatcatgactcgaggccaacttaatcacggctcggaacgatctcgttttagacttcgaaagacttagccgatgtaagttcaaaacacttcatctccgaaaaccccggaagagataatcttcgaagatatcaccgggtacaaaaatcccagaatcttcggaggataaagacaatctctttcaacgagataaagataaagaggtgatattctcggaccctataaaaaggaccttagagaacaaacaaaggggcacgcacaaaaacgctctcaacttcaggctatcaaaaacgctctgactttgaaggcaaaaacacctatttctcatactctatcacacttgtacgataaaaccattactttctcattaataaaatcaagaacaccgtccgcggtaattgagaattctgttgttctttgagaatctcacaaagatccgttctttgaagaaacccttaaaacaaattctattgtgcgagttttgactctcacagaggtaagggttagttttgatgtctctcttcttgctaggtttgggagaagaggtcatgggtctgagatgtggcggatctacttttcctgattggaaagttctgggttcggtatgttctcgacaacagtttgcgaccggatttactagcttcgatcaaaatcctgatgttgtgatcttgtccgcaaaggaatcttgttagcatcgaatatggaaagtgagattcgtgttttccggtgtactgccttcttcagattttactgcgcttgttttttccgttttaggccgcttcgtttttgtatctgtgtaatctcttacggcccatcagccaaagcctaattcgggaagtaataatatatatatatattaaaaaaaaaaaaaaaatctcatgtattaaaattgatgtacttgtgactggagaagtatttgttcagctagatctctagtttgtaaaagacttattaaaagagtcggttcaggggcttccatctctgttcaactattgacctatctttaaaagttcaaaatctgatagatagccggtcaaatttttggaacattgatctcttgaaagagctctttgacccggatgatgtccagctaataagtgcactgcacttggatgcgtcaacaagggaggatttttcgggttggcatttcacaaaaaacggaatctatacagttaaatccggctaccatacagcacatatggatatcttgggaaataactcctcttctattggcccagagatcaaagttatgaaagcacaagtgtggaaagtgcaatgtccgcctaagttgcgccattttttatggcaaatattagcaggctgcgtgcaagtaacagagaatttacggaaaagaggaataaattgtgattcaggatgtgtcagatgtggcactatagaggaaacaataaatcatactttttttcagtgtcatctggcaagacaaatatgggctctttcaaagattcctacggtcccaggggtttttcccacttcttcaatttatgcaaatttggatcatttattctcaagaatcccttcagaatttgattcatccgcatatccatagattatttggtatatttggaaagtaaggaatgaaaaagtgtttgaaaatgtggataaggacccgctagacgtgttatgtctagctgaaaaagaggctcatttatggcagttagctcaagtagagttcaatactaaaagcctagtctccatatcaatcggaaaaccaactccgggtgagggatatctcacaagacattgtgtactgtggctttcgttgttttgtggacggttcatgaaaagaaaacgacaagttttcatgtctaggttggttttgtacttcatttaatggaggtacgtcaacaatgggagctgctaagctacgtagaagtctttctcctctcaataccaaagtcgaagctctactctgggcaatgaagtgtatgattggtgccggcaaccaagaagtagcttttttaacaaagtgttcagacctggtgaagatggtgtcttccccaaccgaatggccagcattttcagcgtatttggaggagtttcagagcgacaaagaagagttcacttctttttctttatctttaatttctcgtaatgtaaatgttaaggcggacaatttggcacaaaaagtttgtgctgaaccgcttcatatcacgtatgtaaacaacttccctcaagattgactcgtttgagtcctaactaatatctgttgattaaaaaaaaagttgatgtacttgatgatttgatagctccgtatacatgtatgatcataacgtctcgactgtcacatgttgtggagcataacatctgttcccgacccatggttcacacccttaaacggtatataggttacggtatataggttatttaagaaaattctaaaaaaacttggcaattgactaaagtagtagtttcgtttctttatttgttttggtttatatgtaagcaaataaatgttcaattaattcttgatgtgttttgtgcttacgcgtaacttgtcgttgtggtcttttactcgtcgtgaaattaagccttatgtttggagcaatgtaaaaggtagaaccggttcttactccaaccagaattaggttgactttgaaaatttcaaatacgacaatgaccgagtttttggaagtccatttttgttagaaaatcatgttaattatgttagttgagtcatttaaataattcatgcagatttgactcttttgcattggcagatttctatttttactgttctgttctttaaaaattgttaattaaaagcaataggcaagaaagcgctatgatctaagcggatggtaacataatgcttagtgtctaaaacgtttaatcgaggtttagacaattttagatggttcaagcatttataatataaatattattaatataattttgtatataaatattatataaaatatctagtaagaaataaatatgttaaatcgtaagcaaaaattaaaaaaaaaatattcatttaagtatattaaacagtatatgaacatttataactatttatataaatataaatttagttgaaaactagaaaaaatacactaaaacaagatatatacaattttaagcgggttaaaaaattgtctaggcttcgcatgaacgcgtagcacctagtcgggacctagacgactacgtaaaccgctttttaaaacattgattgaatgtctcaataaaaaaaaatgcttggaacctttgaatttttattgccgccttgagtggatagaatgtttgcaagggaaaaattataaactaaaaaattagaccatttgttttatttaaaagttaaaagctaattcaattcatgtttaaaacaaagtagcactagttaatgttgtaatctgtaatacttggtcaaggttggaggaagtcaaagtcttggtgccaaaattagcgagtaggataattgagagcacactaatgtaataatataatggggccctaatgtagttgatcaatattaaatgatgcaagtggtggtttcatggaccgtgtttatataagtgtgcataaaaaacacaaaagagctcaattcacgatttgggagaaagaactaaaaacaccaagaaaataaaaaaagagaaagaggatggagaaagagttacatgaatccaaggtggctacttacaccgaaagaggcattggatcacacgactcatcgcctgaaaaggagaaggaaaaatctcataagcatagaggattattccacctccatcactcaaaagatgagaaagatggagacaaaaagaaagaaggatcaaagagagagaagatagctgcagcaatggttggtcttggagccacttttatgaagaagaagcacaaaggtggtggaaaaaaggaaaaaagaggaggaggaggaggaaaagaggaagaaggaggaggagaagaggagggagaagaagaagaggagtcgtcttcatcggaggaggaagaagaagaagaagaaggaggaggtggtggtggagatgaagaagagggaggaggcaagtttagtgctttcattacaatgatcgccgaagcctttgaagaatgaaaatttaatttgtgatcactttcttgtcatttttttttttttcaaatttgctatcaaattatagcatttgtaatgttttatatgggatgttgaattgaaaagttattttctgtataatcttttgatatgtatttttgaaaggaactcaatatatggagtttttcttgtggcaatagataaaagaaatatgttatataaaaatgcaacttcgtgacgacctgttcgaatcttcagcactaataagacagccgtttgttttatgttattggatcgcaatattagattttagctttctatgctaattaaaaatctacttttgtggagttgatcaataaattgggtgcaatagtctacttttgtaggtctctcgttaccttgtaggttgaagcctcaagtttctaatctaattttggttgacttaaagatctattttcaagtctggtttaatcgatcatatagacgtgtagttacataattgttttcatctggttgacattttaagtctacatgtaatatttttgtttttttgaaaaatgatgatggttattatatcaacaatattcacttatctttttcatatcaactattaagataattccacaatcagtcgtgttggagatattgcgatatagaggtatgtgatttgttttgaagtgattttcagtatcatacgagtgaaaaatatatatacatcaaccatgcgttctttgcggtgaactagatgaaactcgtgaccacctattcttttgcgtgccctttctccttcgcagtttggtcctcactagcaggaaagctgcttcgacatcgtttaactccggattggggtgacacagtaacgacaattcaatgtcgtacgtgtgataacctccgagatattttgcttcgtctttgcttccaagttgctatttacttgctgtggcgagagaggaattcacggatccatggcaacgactccactacatcggctcaactaatccggaatggcgagaaattcattcgcaacagaatttcatcacttgactactcctccacccctcgtttgcgtctgttattccaacggtgactcatggtccgaccatagctgcaggaaaaccaaatacgtccactattctttgctcgtggtttttgttctgttttcttacactcttattctttacaaacctggttttttgctaggtctttttattcttttgtaaatattcttttggtttgatatataaattacacatttaaacaaaaaaatatatatatagatcaaaaatctcgtagtaatatttagaacaaagacggtaaatctttcaactttttcagaattgtaccgaccgttaaacgaattccctgatcgaaaatgggtgtagactattgggataaggttgaatatactcttgatatgttttatttcctataatttaggagtttgggtttatcacatataatgatcctcttgtataaatacacaatgttcgtgagttaataaagtaagttagttcaataccttcttctacatggtatcaaagagcaaacaaaaccttaaaactcctaaatattttcgttagttttgtttcttacgtgttaattaagaaagtcatggctggtgacgatgtactcgctacagctggacaaactgttgcgcttgttgcgcaaccttctacggcggctgtgtcgccttacaccttggctagctccgacattccatggacgatgatttcctctgttcttttgaacggagaaaactacattgaatggtctgaagagatgttgaatgctcttcaagctaaaagaaaaacaggtttcattaatggcacaatcaaaaaaccgtccagtgaagatcctaatttcgataattggaaagtggtgaattcaatgatcgtaggttggattcgggcttcgattgaacccaaagttaaatctactgtgacgtttatttccgatgcacatcttctatgggacgaactacaacaacgtttctcggtgagcaacaatgttcgggttcattacatcaaagctcaacttgcctcatgtcatcaagatggacaaacagtaatcgattactatggaagattgtgtaatttgtgggatgagttgaagaattatcaagcaagtgcggtttgtgctcatggatcgataatgtctgcaattgtcaaggaacgagataatgagaagcttcaccagttcataatgggccttgatgattcaagatttggtgggctttgtacaagtctcattaacatggatccgctgcctttccttggcgttgcttattccaaagtaatcagagaagaacagaggcttggttcttcacgggctcaagaacagcgacaagaggcaatcggttttgttactcgtcgcgagaactcttcgatagcatcttcttctacacagtctgaagtccaatatgggaatcatgttgattcttctattatcaagtctcgtcctgttcagtgttctcattgtggacgtacgggtcatgagaagaaagactgttggtccattgtaggatttccagattggtggacagatcgtaatggtggcggtcgtaactcgggtggacgcggtcgtggcggacgtggtgctggtcgaggtcgtggcggacaaacaccagtggctcacgcaacaagcgccaatccaacttctttctcggactttacatcggatcaacttcaagctctctctctaatgattcaagagaaaacatccaccggcacctctgataagttgtctgctaagacgatgctttgcaatgttatttttgacacaggggcttctcaccatatgactgggggactttctcttttgactaacatcgtccctattacaccttgttctgtgggttttgcggatggtagcaaaacttttgccttaagtatgggcagtttcccgctgtcggagaaacttacattaaccaatgtgctttatgtaccaacattgagttgcacattaatttcagtctttaaactcgttaaacaaacaaaatgtttggcattgtgttctgatacaatctgtgttttataggatcctttttcgaagactttgattggaagcagtgaagagcgtgatggggtttactacttgacggatgttgctaccgcaaaggttcacacagttagtgcctcttctaatcaagctttgtggcatcaacggttgggacatccaagttttttagtattgtcgtctttacctatggtttcttcttctggatcttctgttagctctcgttcatgtgacgtatgttttcgagctaaacaaactcgtgaagtgtttcccgatagtattaataaagctttggattgtttttctttaatccattgtgacgtatggtgtccttatcgtattccttcatcgtgtggtgcggtttattttttgactattgttgatgatttctctcgatcagtatggacgtatctcatgctagcaaaatctgaagttcgcactgttctcacaaactttttttgcatatacggaaaagcagtttggcaaaaatgtgaaggtggttcgtagtgataatggaacagaattcatgtgtctctcatcttattttcgtcaacatggaattgttcatcaaacttcgtgtgtcgggactccacaacaaaaaggtcgtgttgaaagaaagcatagacatattcttaatgttgctcgggccttgttgtttcaagcaagtctcccaattaaattttggggtgaagcagtcttaacagctgcttatttgattaatcgcactcccacttctcttcacaataaccgttcaccttatgaagttatttatggggccaaaccatgttatgatcaattacgagtgtttgtatctgcttgctacacacaccgtgttgcacgagataaagacaaatttggagaacgtagtcgtttgtgcatctttgtcggatacccatttggccaaaaaggatggaaagttttcgatattgagcaagataggtttttcatatctcgtgatgtcatttttcgggaagatgtttttccttttgctgagaagcctacttccgctccgtcgctagctgtcccgatagtctctgattctgattggtgtatgcctccagtagacagggggagtttctcgatcactccaattctgcctgttgacgatgacattgatgtttctcgggtaggttcgattactccttcaatggaagcaacctctccgactccaccttctgatgaaaatgtagctgctactcctaacacggaatgtgttatttctccggtggctactccgtctgttcctgttattactaagagtatagttcccaacgtacccgaacctgttgctgctccgactccaagcgttgtcacccctccgcctcgtcaaggcaagcgttcggttcagttaccggctcgcctcaatgattacgtcttatacaatgcaacaagtgaagttttaacccatcacgctctcttgtcctctaatcgtaagtcttcgtcatcggcccaaggtaactcattgtattcgttaacaaattttatctctgatgataagttctctgcaggtcatcgtgcgtacttagccgcgattactagtaatgttgagcctaagtctttcaaggatgcggtgcgtgtgaaagtatggaacgatgctatgtttaaagaggtcgatgctctcgaaattaataagacatgggatatcgttgatttgccaccaagaaagttagctattggaagtcaatgggtgtataagacgaaatataatgctgatggttccattgaacgttacaaagctcgtcttgttatccaaggaaacaaacaagttgaaggtgaagactacaatgaaacttttgcaccaattgtgaaaatgactacggtccgtattcttcttcgtcttgttgccgctaactaatgggaagtttatcaaatggatgttcataatgcatttctgcatggtgatcttgatgaagaggtttacatgaagcttcctcctggatttcgtcattctcaccccgacaaagtttgtcgtcttcggaagtcattgtatggtttaaaacaagctcctcggtgttggtttaagaagttgtctgatgctcttttacgttttgggtttgtacaaggccatgaagattactctttcttttcctatacacgtaaaggaatggaatttcgtgtgttagtttatgttgacgatctcttgatttgcggcaacgatgagtatatggtccagaagttcatggagtacttagggcgttgtttctccatgaaagatttgggaaagttaaaatattttcttggtattgaggttagtcgcggctctgatggtattttttttatcacagcgcaagtatgcacttgacattatatccgacagtgggaacctgggatgtcgcccagctttcaccccattagaacaaaaccatcatttggcctctgatgacggtccgctattttccgaccccaagccgtaccggaggctggttggtcgtttgctttatcttcttcatactcgacccgaattgagttactccgttcatgttttatctcagttcatgcaagctcctcgtgaggctcatttagctgcagccattagaattgttcgtttcttgaaaggttaccaggtcaagggattttgttaaaagcagatctggatttacagctagatgtttattgtgactcagattttcagacatgtcctaagacccgacgatctcttagtgcttatattgtgttactcggtggttcccccatctcttggaaaacaaagaagcaggacactgtctcacactcttccgcagaagccgaatatagagctatgtctgttgctcttcgtgaaatcaagtggctacgaaagttgttaaaagaattgggtatcgaacactctactcatgtccgcttgttttgcgataataaagctgctcttcacattgctaagaatccggttttccatgagcatacaaaacacattgagtctgattgtcattccgttcgtgatacggttcgtgatggcatcataacaacacatcatgttcgaacaaatgaacagttagcggacatatttaccaaggcacttggtcgttcccagtttctttacctcatttccaagttaggtgttcaggatcttcacactccaacgtgagggggagtattgggataaggttgaatatactcttgatatgttttagttcctataatttaggagtttgggtttatcacatataatgatcctcttgtataaatacacaatgttcgtgagtttataaagtaagttagttcaatactttcttctacatagaccatggtgatgactgttataaaacgatctctctttacttcaatcaatctcaatgaaatgaacaacgtcttcaacacaaacacacacgcaacttgagaatcagaatcaacacggaagtaaatgtaaacaagaggcgagtttgttaacccggttcagctgatcggtgtgatcaagcttacgtccggagccgaatcaatccggcaaattcactatcaagaagtgttttgctcaaaaccagagcttacaatgtcaacaatggtggatcaatctctctctctctgctctctctctcacttgaatacaagaacaaagaagaagatacaaagaatgagaatataagcgatgattcacaacagaatcttgttaagtaacagaaaccctccactgcagttagagactctctgatccttcaactttgctgaaccggttttaaccactccactaaccagcaataaccagactcaattctcaaagatccaattgaaccattaaaccaatgagaaattgaatcataaccattacaggttttaacaatggcggtcataacgttataagtgatatcagaaattaatttagacgaatgtgaagtgatatgggttcatattgttggaggtaactatatgattcacatcaactctgggttttttaaaatagtcgtgcatgtggagatgaagaaaataactaatttggtcgcttatatcacgtaaaagaaactatgttttcatcgagataaaacgatttatgatatctacttattaggaagtgatttataataaaaaaaatttacataagttgatgaaaaaagaattggtctcatagtttgttaaagtgagatatggtttctaccgtttgtcttttcaatcgtttttggaccaaactattgttaatgggagcaaccaaaccgcacagcagttggtttcggtttagattatgcagttcagttttgaaaaaaaaaaaaactgaaatgaagaaaccgaagaagaaaaagagaaagagatggagatatttgagagagaagtagaaagaagctcaaaattcattatccacttcttcatatttcaacatctctccattgaactccaaaattgaggaacaaatttcttgttttcgagatgaacaaaatgcaaaaaaaaactcatagattcaaactaaagatactctaagtttacaagatttatttataaatagtaaccaaaacgtaagaaaaatgagattttgagaaaactgctaaagacggccgcaaaattaggtttgcagaaaaggatacacaggttgaagatgactggaaaattacaattatatcctccatcgaatttcttctgtgtacgtatattcaatttacagtgtacgtacacgaaattatttattgaaacgtatatggtacgatttctaataactcaagctattttattacgtattcttatatctcaataatctccatacatacataataattaattaaaaatagatggtgaagtaatgtttgttcctcatattgaaaagttatgtacgtatatgtgtaataatgtacgtacatttttgttggtaaattaatgtatgtacatgtgtaataatatacatatatctttgtttgtgaattaaattattaagaaatatttattgatacaatattaaaccaatattggcagtggctgaaatatattctaagacgttcataggatgtaattttgaaacattctgaattcttgacgacttgagcagtcaaatgtcatggacaagtatcatcaacgcataccatctccaatcttgtaggacatgacctaggttgcttgtagcaaaaaaattgtttgattgtgagataagacattgtttgttgtatgacttttctgttgttaaaaacacttcccaatctatagtatatgtacattggtacaaaccatgttgacacatacttcttggagttacagctggtgtacggtcacccgagtgagaaatattatctccgtcaggtacacgctgacttgtgtacgtacattctgccaatagacgactgaatttccatggatgttgaacagtcaattgtgtgagaatgacgttctcctcaacattccctattccatattcttctacaactacatcgttccacttgttgtaatcataattttcgccactactttaactaccatcaatagtaggatcgagggtacttcccccccccccccatagatccatcgttaccctgataatcatcatacccatcaccgtcttcattgtccccctcctcttcatcctcatctgttttatcgtcttcaacgtcgtcttcctcatctatggcctcattattttcattaacatttgaagcactatcacacacacggtcactttcagcatcgtcaccatgagtcctagagacattattcccgagtgtcttgacggttgtaatgaaagagacaaacaagttgagagaaggataccgaccacgaatcaaaaagaacgtatccaatcccacttgactatcaatgaagacaagagggcgttgagtatctatcatgactaacatctctcccgacatctagtaactaattatgggattgatctctgtggacttaaaactgaaagcctcgcttagtgtacgtacaaattccgtgtatgtaatgttttccttaatacgcacacagcgaccaaacatgtcttcctttggtttaaatttccattcttcttctttgcatctccactcaccgaccatagtaaatacgggaatatccattacccaactgcatcataaaatcaagagaaacccattaaatgcaactaaaaacatgattatatctacaaaaacaaatagaatttcgatatacacacttataaacataaatatttacacatttagcattttcaaccaacaaaattggaaataaaaaatttctgggtttttctataaaaaacaaagttgatttcgaacacaatgaagatcatagtgtgttataacaaaaaaattctttaaaacttcattacttacacgataatgattatcttggctccaaacttcgtaaataaacaagataaacacttcttgagcatcaatgtacgttcgcaattaatgttttttcctgggttcatttttaactcaacaattattatcaataattttataatattataacatgtaataatgattttgcattaattataacaacagtcacgtctaaactttttgggccattaaatgtttatgtcacttcgtttttaataaaaaaaacctcccttctaattgtacagctgcactcctcaacgtgaaacaaaaatatcttcaactaaaccggaacagtgtacctaactaaacctgactaactaaactgtacattcaacagtttcttagctctagcagcaagggcaaaagggtcaaatttcagctgaaaagacaaaacgtgaaaaccacttttcactttgtcaatctctgaaaataaaacatggtcaaagggtgtggtccgcaaattaccctttataataccatgtcaatgtgaacaaaagaagaagaataatgtgttggtcatgagaagaagatatgacaaatctatctagttttcgaaatagcgcactaccagttagacaaaaatgaagtctagtagagcaggcatgaagccaacatgtcaaatacatacttggggcctatggtggtgcggtctaaacatttaactagtgtttgtgacatattgtttcaaggcttatagttttgccaaagggaaggaagtaatagaataactgaagacttctcttggcttgtgattgagttgtaaaaagcaggggctgggcttggcctcctaggggaatccagacactagaaaaacaatcgtcgatggaactctcaactaagggaaatccacactcaatactacttgaagaatctaggacgaagcaaagggaccaaaagacacatttttgaaaccctcttttcttcacgagactttatcttaaatggacccgaatatggtctttggtttgagtgcagcttcgggtggctatggtccggtcttcagcagtatgggaccttgcgaggaccactaaggctggtcatatgagtcttggactgaaccggttggactttatcaactataaaataaaattatgtataacagccagaaaaaaaaaacaataatatagcctacataacgatttagaatccaaataggtaacatcaatgatctacaaaacttcagtcctggttaaagcaaaagagtctaactcagagaaataacatattaagattacgacacaacttggagccagcagatttacatggtacactaccacgaaagaggttcactgttttagggaacaaacatagagagaataacaaaactaaaaagaagtaaataaagagttctttgcttcttcaacaagcaactaaaaccaaaacacactaacttcaagactcctattattactactacttcttctgctgctgctgctgcttcatcattaagattccttgtgccacactctttcaattcccatcatctgatgatttcaagtaaagggtttctccaccatcccctgaacttcctcctctgccttcaccgccaccaccacttcccatttccggcttcccacggccaaaatcatgaaacccaccagcctctccctgaaggatatggagaccactgcttcctcctcctccgctgctcgagctcattccaagctggctatggtgcaattgctgatgctgaagcgtcgcgtaaggctgctgctgctgctgttgctgagcatacaacattgaagatcgagccgccattagagactgctgagtcatctgttgctgttgagtcgcttgttgctgctgcaaatagtgtgaccctccttctccctgaatcatcccaccaccagcagatccatactaataaccaaacaaaacaaatcactttctcaattgatcatacaacaaaatttggaatacttcactgtataaacaatcacctggctatgcacacttggtggctgaggctgagaatctgctattgcagctaggtacattaggttgcgttgaagccttgcttgattcctataaccattttaatcatcatttcttgttactcaacagaacacaagtgaaatcataaaggagatatgttgtctcttactcggcgcattcgctaagctttccagagttttgagactcaacaatcttcagaatcaacgatttgttttcgtccaagtactacaatcaaacattttcattaatcattactaatgctacaaacaaaaaatttgcatactattttgtttttgttgtaataaagacatagaaaatctcaaaaggagaccccagtaacttaaattccgacttatctcaaaagacaataatgttgaaatatcacaaaagtgtaacgaaagattttcttcgaaaagattttgaggaccacacaaaaaaaaaactgagataaggaccagatgttgtttcggaccacaaagtatatctggtcatgtaagcaataaaagaaacacttggactggaaaatacacatagatctacttataatgataacaaatctaaacaggaccacccacaatattcacataaatggctttgtggtttttgccatcaatgaaacttccagaacccgaaaaccaagacaagaagaaaaaacgagatatgtgaaacaaatcttcagttcccaagatttgtctgttttgaacacgttatttttcattacatgtttcaagaactcaaaacacaactggaccctaaacattcattttcattgaaagaaagaatctttcttaactttgtctggttttagacatttaattagcatcaaagttaactgataatacaccaaatctataaggaaaagaaaaaaagttgaaagaatcatcttagtgaccaaagcatctctaccaaccaaatttatcaaacataaacacacatgtattaaaactaatttctctatgaaaaaaaaagacatggaaacaagaataacaagaactcttttaccaaacaaaaaagaaccaatgaaaaaaaatcatctatgttatgagaacagaagaaaagggtttcacatacttttttatataatataaagaaaaagttataaggtacttgcaagagagatttcttcactttcctttatgaattcaaagaaacatataataaagaaaaaagaaagagataatataatagaagaagaaggagaaggaggagaaggagaagagaacctgttggatatgatcagaggtaacattgctggggtagtaaccagccatcatgggctgcatctgcatcaggtgctgttgcatttcttttgctattttatataaaacctgataattccttcttatttatttatatattttatatatataagtttttatagagacaacccccaccacaaaacccagaggaaaaagagaagtctcaccaagtgagagagagagatattaacttttgtatctgtctctctctctttcctctatgcttctgtatatagaaaactcttaactattgaagatgtgtatctctgtgtgtgtgttatctcgctttctctcctccacaaaagttgttttgcgttaaaagactgagagagacagtgaagtctcttaaatagaaagagagagagagaagagaagagagtgtttttctctttttcttgggttttggggtttggttttgttggtttctttctgtctcatcctatctctgtctctgcgaagaagaggaggtcacgtgacgagtcatactttattatagagacgtgagacctttacatatatactactacttatcaatatgtacacattgttgattaaattattactttgaagtttgaacccttcgtatatagagacgtaactatataccaaataatactgtttactccttcgtatgtatatacggtgtatttacttgtatatatatgtaattatgtatattaaaatctcttacaacttttgtataatattttctacatttatagattcatttcgggattttataataaagtaatgcaaagtaggatttattgttttctagattgttttggtaatttattgttttctagttttctagttttcttttactatatcaaagaatatttttgtcgtcttattttgttttggtaattaatatataaaaaaaagatgtctttagtttttcgaaaaataagattcatgtatttacattttaatataaaaaaatgttctacataggagtttttaacctagtggattgaatttgtatttttttaataatttattatatttagttttacacaacattttttttacaatggtttaattttttatcatgagaggtcacatctagatgcgattcttcacatttaaaataaaatggattaatgaaaaaattagattaagaagtagctatgtgagataattttctttgtagatgtttgattgtgttgatcaaaagagtctcttctctcttataccttaaaatcatatttataggatttaatctcaaccaaattactgaattatgttgtgacttagtcttcttatgcggattagatttggcataactagttccctagaacatgttatcaaaacaagtgtgtttggtttgttagcttaatgatgtttttcattttgttttaaaagtagcgcatgactcgtctcgtctcatcactaaccatctttatgtgttttggcaaaatgccaaaatgtaaacacatttcttacgcttaccaatagttatcttctttttttttttggtcttttttttttatcgaatcacgtaacacattataattgactgatatcttaatagatgaaatttatcctcaacaatgatcaatacatgtttctttttttttacatatgttaatactaactcgatcacttgtctcgaccaataagacgagttatcgaccatcaaaacactgccctaacttggtttgaatgtttaatattgatgattctcaaccaaagggtctctaaagtttttgaaatgcttttgtaaagaaaataataataattagtttggagttatttgataagtctcattaactttttgttcgaattcttgaagtacgtttcgatggtcggtaatttaaaaagaaaaagattcaacagctatattatctttgcgtggttatacttaattccacgttaaaccctcttgtagatgtggttaaatattaattaacactttattcgttggtaccaaaaatggatccgagatattccttctgcatatatgaaccacggaggctcaacttttaatgtttgtttgtttaactatagtattatgtatgaacattaaagtaatctgtaaggataaatgaattgttttcttttcccgattaattatgtcttatagacaataaccaaaccaatagtgtttctatgccatctaaaagcaaaccaaaaacactaggaacaaaactaaaaataccatttcttcttttttatcagaccaatatagttgtttgcatactgtaaattgagattatgaagttaaaggtaggattctgaaacgcttacaaatgatcaattcattttggttaatacctaaaagaaatattaaatttttacgacattaattttatactaccttattttctatataacagccataaattttatagttaatgtgaggttgatgttgaatcctcttacatagagaaaagtgttgcagcaacttgtaacttattattgtactatctttgaccgattaatatgaatattcaccaagatattggagaacttataaataatgaaacttgcagtttttgagctgagatattttgtggttctgggatacatgaaattacgtactaaaatttcttagtaacaataaatgaaatgttatacgtataaagtggaatcacgttgaacaagaatatgtgcgtcgatcttttaaagaccgcttctgtccaaataatacttcttgtcagttatgacatcacattgagattctaattacccccacgcgcttaatttctttttcatcctatgctatcttttaataatactgatttgttttgtattttgttttcagaaaaagtgtaagaaacaaaaaaaaagaaaactgaaactgatttcttttttcactttactcgcgaggaaaaaaatacatagttggaaataattaacgtggttataccaaaaatgtgttgtatcgtatacattttacttgaccaaaatagattttcttctgctatataaagtagaataaagtaaacagaatcattatattatagacttatagtttaaagtgagcagagcacgaaaattaaatgagaaagacacattttacatgcaaacgaaacgaccataacaacaaaactccgatgtgtcaaacatgtgatgtccacgtatattttatgtcttttcttgcctaaaatttggcaagttttgttaattgtcggtttatataactaatgtgaaatgcttaatggcaagtgacattgctattgggtttcagtttctaatataaaaaaaacaagaataatccacctatttttcctctctcttttcatatatctaaatgtattttagtatgtagatgcagtctctttaccaaatgttagattctacgtctgacaagaaatatatgcaaacatgctctatattgaatactgttatctcaaaatattattattttcttttttggtattccacctaccaacagtgtaatgaaatttttaactataacatataaaagaaaatattatttcagttaacaaactttgtgactaatgactatttggtgtagtcctgcaactgttcttctcatttttggatacccaaaaagcttttgaagcttagggtgcctgttttaggtaccgaaaatgtcatttcgtttcaggtgcaattgtgatttaagtgtggaaataatgcgaatttggagcgatacgatcagttaatattgtgaatgaagatacgatttgggtgcgatgcgattacatcatattttttaaatggcaaaacgatttagatgtgatttgagtgtgattagatttttttttttttaccaaattagcctctacttatattatttttagtttcttttaattaatataatttataatatatgcttatagaaatattttttaaaataaaacatatatcaactatatttataaatcaacatctactcaccaattttaacaaactataatataatttttttttacaaaaaaaaaagaacacaataatgtttgcttctccttatttcttttcttttgctcttcatgtttctcttcttctagtttttttttttcatccaactatttataaaaaccgagaaaaacatgctcgatcaaaccatataacttcgagatatccaaaacaatttgcaatctcgttttgaatacctaacatgtatgcatctccaataggatcatatctatggttttgaaaaactgcatttggatccacgttttttgattcggttgtagggtctcgaccactcctatttgtgagaatccacgtcctctctcggattcgtggggtccattcctctccaatggtagatccgttatgttttggaggctttaaaaagttgtttaccaatcatacaaattaccacatgatatttttccgtgttttgtcttcgttcatacgtttctgacaattacttttcaatgacaaaaaaagtaggttcagatttttcttagaaaatatcaaaattgttagtcaattaattaatatttagaattattagaaatcattctaaaggatgaaccgcttcaatatttctccgaaaagcgcccacatggggaagctctaccaccgactacacccaatttgatgtagacttgaatccatcttggcttatatatcttgagcaagaggagcgtgataaagatattaattctcgaataattggagaaaatagagagaatttagaggaaaaacatggacatcgatgattacgatacgttactttaccaaagagaggaggaaaatttttggttgaaaacctgaaaaagaaaaaaaacagttatcttgtcccaacataaaagtttgtaatatagttccattctaattagtcaaaataaagaataaacatcaaaaaatatatttttatttgtttcttattttcaaaacatttttaatggtataatatttgtgcaagttacgagactctctcttatttctctagtatttttttaaagagagaaataatctaatttttctgccctctggtcaaaatatgacaaaattgtccgtgtttctttcgctagttctcattatgattcttatatgatggttggtcggctatatgcgcaaaatactctggctttaatagtaaagatatatggtttgttttccgacaaccttgctttgacgtaagtcgacttgcttccggcacctatcggttttgtcagcgacggttggtcggcttctatctagagtttgatccattcggcttctatgtagagtttgatccattagtctctatgcttttaattatgaagataaagatttttttcctccgtgatactctttttggcctttttggtttgatttgccgtctttttagggtttggttatgggtgttgtcgtttgggtgtctcttggtagtttcctccaccaaatatttcaaccagatttgatcgaaatatagtttgtttttgccttctctttacatgatttaagtcgacaaaccggctgtgactatttttgacgaattatctctatttctattgaggcttggtcatgccaatttcagaaagcaatatgcatcattgttgaagtctaacttttaccaagtaaagacaataagtttaacatatttttaagatttcatgatgatttcaggttttcaaagtctttgagaaataatttttttaaaaggaaatttacaacaataaccaacaaaaaaatataaattaagaaactaacatcaaacaaaaacaaggttgatattctatgtattttatgtattaatgacaatattgccttatgtgaactacatagactttttctcctatctctcctctttgttttttttcacttgattcattctttttcatctgcaacaaatgctagattatataactttaccaaagatctattcttcctattaaacccttttttttgttacccattaaaaatcctaaatccatttgttgattgtaccactgtcattgatttgccatcactttacttctgataatttcgatcaattcaccaacaattcggatcgacttgatctttcgctcgtccaatcggtattatcgttgtcgtccacggcttcgctggcgaaaataattggttacccaactcacttattatctcttcgctaaatccgtttgcatcaccaaagccataaaatttccaacggacaatcgctcatatccttgacatcaatgtttagtctattacagattccaacttatttgatttgcccagaaaatgtttctgtaattccattaagttatcctacaaccaaacaaaccaattcattcgatttcgatttgtttgtctatttaaactattgattaacaaatgggtaaaaaaaatttgtgagaatcttaccatcgttaacgtcaccgctacggtttaccttagttatttgggttgccaattcaccctttctttaaattgtctatgatgaaaaaaaaaacaaaaaaaagttgtctataatgcaggattagtttaagggagcccttagtttaaccggtttgaggttctatttaaaaaacaataaatttgtaagatattttagttataataaaaaaaaaatatttcagtgaaaaaaaaaatctctcagtgccaaaatgtattttctcggataccaactcatacactaaattcactaaatatatatacccatacactaaattatacaggaagggatatatatatatatatatatatatatatatatatatatatatatatatttatcggtgtcattgttcaaaacaatattagttttgtcaaattcgaattccgatggcagaaagaatcacagtgctatttgtcatattttcaaatacaagaagatttatacatgtgagaaatgaaggatcaataattaagaaattgggtcccgaaagttcacatgatctccgaaagtcatgtccaatccatcattcaacattatgcaacaaggttgttgacaaaactctttctttcttatttgtttctctagcgacaatattcctctttaaaagttgatacttttagaataagattcctaagaaatatagcaagacaataatataaagaattataaaagaaacttatccaatggcactactcccaacttcgaaatctctatgcaatgtctttggacaaagaaataaacgttatttgaaatatatatttttataatataatagataagatgataaatttgattatgtacatattttaaaatacctttatgtcgcccaaatataatatttgatataattttaactcacaattttaaattaattttctattttacagaataaaacggaataacttaaaaaattgagaaaattgtattccataccaaatttatatattaatccaatacatattatacataagttccaaacgataacaacagatcagatgttatggaacaaacagattaaataatataatatagtttaagtataattcttttttatagagaaacgcagtttacaaaaataaatacggttagtatagactaaatggcgagggaaaatatttgaagatgattataacagtatagtgcaaatataataattatcaagcctaaacttttttagtattttggataacaaatctttttaggaaaaactaagaaattgattcatataattaactctctcatatttttttaaatattttaaaaatttgcctaaaaaacttaaatgaaacaacacttaaccacatgataacatactatttatggtgtttgtccacataatacgtttctttgtaaaaatgactgtttttctactttattattttgttttaaaacacactaatttaaaatacatgtcaactaattttctgattatgaataaaaacgtacggttcaactatggattaagtacggtgtaattttaataatgacaaaaatatatatatatttgttattttgtggttcggtatatatttggagcttgaatggagacaaatttagtgggaatcacaattattatatgcacaactactatcattcaagacttatatatatagagtctctttggtaaaaagaaaattggaagagttagggagaccatatctttcagtctttcactttcatcccttttttgcgtaatacatacattcatatttgtactattaaacggtggatatgtatttatccgaatttaaaatttgtatgagttaagtattttttactcgttggaacttcactcgtttcaaaatttatgatccatatgaaaatacattccagtataatataagttttcaatttttgtttcgaaacagaaccgaaccagacaaaacatgaaagaaaattcctgaaattctatttgaagcaagttatgtactaaatatgatattttgtatatactttatagtaataaaatataaaattatagaatattacacacaaactgaacattaaatttcttatatgtttctaaatgtgaccaaagttacatactattatatttgatatcatttaaaattctactttgtcttttataagtggaaagcttatttttctaaaatttttataatgactatgtggtttttattttatagactagaatatagtggctgtctttgatttctatgtttaaaacttattaatgatatattaaaaaaaaagttcttctttttcttttaacatctttcatttggttctatttatgtatgacaaatgataggaagacgaagaagactcagacaattgaagactagtatctctaatagtaagtcggagtaatatttttatttttatgattgtcatttttcatattttttgcgaattctcgttcccgttccatctcatttatattccacatttcatatggaaaatacatgagagttttttattaggttcccgaatttatgttttattttgttttcgcaaagttcagttctaaattttctgtttgtctattcctactttctttatttaactcggcaaatataaatttagattgatgattttttattggaattgtaaagaactatcgtgtatatatatcttttgtcctttataaaaatatatagttagtgaaatcaaatatagtatcactattatttttgtacctttattttaaccatgctttatgatttcctctagttattccaatattatttatcctaacatttataccattttacactactaatcggacctttaatacgttattttgctgatattggtataatgttaacttttcaatatcgacattgtagaagaagaagaaaaaagtatatagattatggttggtgagttgtggagagtacaaaccgatgttgataacttgaaaaatacaaatattgaacttgaaccatacttgcataggaggcattggttatgtaaacaagttcggttgtaatgaaaataataagaaaagtaacattggtaatggtaacgataaaagagtaaagaaagtgaatgggtcgtaagaaacaatgattttgagaatagttgttaccattgatattgctttgtgtttgtgttttgtctaaccaaattgattggtattacaagaagagggaacatgtgggtgggtatgaaggcattaatgattagtgagttacgtcaaatcaatttaggatctccacaagggagaacataccctactagtcgacccattcctctctttcacacttctaaattctatttttttattttttttccttcgatgtttaaaacattaatttatctcatttttctcaaccacttcaaatctggaattacaaacagttttacacttttactagttctaatattttttagaaatatttcttttagttccttacatgaaagttggtaatgttttgtatcactcattcaaaataattatttgttatttctatggtaagtagtaacaatttgaatcgatctactatgttctaaaagatcaagagtattttcgttttggatagttataaatattttcattattggctttataaaattgtattttatcgtttgtatttttattctaaacacaaaagacctctctcttttcataaaattacggtaccaactacaaattcgatagtcaaacaaaatgttatatatatatatatatatattgactttatatctttaatacatatgacaatgatttttaaaaaaaagactagaataaaaaaaaaagcctaattattcactaaaataattgagaataattcgacaaatcttatcttgtttaagagattggaggttatgatagggattagggaaagagggagcatggactgaattcggtgaaaaagaaaaatagaaaagtacataaattcacatgccatgttggtttgggtaaaagcttcattgaaacgtcacatcttcatctccattttgatgattttttttattttatttataactttgatgaatttaaaagacgctaataacccatcgttctatctatacgtttcaccatccaagtattattttatttttggtaagattttgatacattgatctattgtattgttcttaccattttgagattccaattgaacccaatgaaaaagaactaagcccattttaaaagtagtccacttagtccatcagaaaaaggataaaactctcatagatttgagtctatcccgttttattcttaagaattctgaacctatatttcttattttggtccaggctatagggctttttctggcttttttgagttttacttttgagaaaaaaaatctataatatcttttgaaaaaaaattgtgatcaatgaaaatttaaatacccactaaaaccaatttaattttttaaaaaattattactattggttctattacatagtatgaagttttctaattttatatttttttggtataagtataaacaatttaaattgtcactgaaaacacaataactctagatttgatttataaaacggaaaatatgagagttgctcaaagtgataattcactaggttagtctcacggttcttgttacttgaatatataagagcccacttgcttagataacctattttttttagctaatattagaaactaattatagaattgaaaagaattgagtaactaaccattgtcagtttttctatgaataaataaccatatgacggtataagaaaatacaaaactatccatgtaagttgaaccaaaagaaatcttatgcagatatatttgatgttttttagcaaatcgcatgaaacatgttaaaataacacgatatttatattaaaaaagtgatattttataacatatatgttacataaatagcatgttatataaaaaaatatcgtttcatttgaaaagttgagccaggagcaagcttatacgaagataaaataatagatttgagaaagttttaacatttaagtcatgttttaagaagaaattacatgtgattttaataaataatgtgttatatgaaaaagtagcatgttgacagagatagatttctaattatcacgtgtaattcgaaaaagtagcgtggtataaaagaaaataacatacaatttaaaaagaaaacataacgacggaaattctaagaaagaatcaaaatcgaataaaataaaatgacaaatcttctgcaaattaagggaaagatgatctatcaatataaataacgtttggcagcctagatttatcgaaaaaaagatcgggtggttgtgatggtggaagatgtagtggttgtggtggtggaagaaagaaagatgagatgattctaagtgttctgtatcattttggaaaatagcatgtaatatatataaaatacaaaaatggataaaaatgtaattgcaattgaagaaagagagtgtactctgacaccatggttattttgttgattcttttataatccatagtcatctagtgcatattctcttttttttttttttttacattcaaactccatatattactttacagatgtttgacaaaaaaaaaatcacggataagaactcttttctagagagagccaatcgggtaccgtcgaacttacatgggaaaaacagaacccgcgaactcttgcacattttgctagatgatcggcggaagtattaccattacgaggaatatacttaatactaaacatagagaataaatctctataatacacaaaatcctttatctttgtagaaaaagtaggtcactcatcggtgttagaagtcatctctaaaagaaccgagcaatccgtcaaaataaggatactagtcatcgtgatcactagagagcacttcatgtacacaaaagagtctccaattcagcatgcaaaggggaaagactcctacgtgatccctttagtcttatatgcaacaatcttcctccacatgaaataagccaaccatgtccactcctcgcctccatccaagccaagacccgtcaataaagcatatcagtctatccgctggaattggtgtcacttgcactatagggttcctcttgaattgcaatgtccaaggtttcttgaggtgattcactcaaattatcaaaaaccttttgatttcgcgctttccaaatataccacataatcatgaaaatattcttaggctctcctcatctgcacccacctctttaccccgccaatacaaataatctagattattataaagtgaaggtgagggaaataaagctagggatgagggatattggagagggcccagacttgtctagctggaggacattcaaagatcaagtgattaatctcttactctgttccacatctaggacatcatttatctctaccaatatggcgataaaaaagtcgttgacacgaagccaaacaacctgacatacattgccacacgaaatgttttaatttttgagtagtttttaatttccaagcttgcgccttaagtgccgtgacactaggtccctgagaagggtaatttcttctgagggaataattcccgaagatgctccattttctactgcttcgtcccaaagtcgatcaaagtattgacgtagaccaatgggtctctttgcatagtaagtccctttggagggcgaaccggagaatctggaatccaaggattagtccaaatgcacgttccaaatccagagccaatagtctttcggattccatatttaagaatatttttggcggccaacatgcttctccagccatacgacggccgattagacagtaatctctaatggactacaatagcggaagtaacgtcctttaaggacccgactaaggagagattgtggaaatcttagtaatctccataattactttgccaacaatgcgagattaaaatcttctaaattcctaaatcctaggccaccgtctgaaaattgactacagatttggtcccaagctatcttgtgtatgcctctactgtcaactttattactccaccaaaagttggcaatcgcactggtaagtttagagcatactgcttttggcaatagtaagcacgacattacatatgtcggaagaacttgtgcttgagacttaattaggacttctttgccacattttgagagaaattttgaagaccatgagttgactctcgtttgtaacatatccctcacaaaagcaaagacttgggcttttgaaccatggatcttttcaggaaggcctaaatatgtccccatccctccttcccttgaaatcccaagaattgttttgatttcttgtcttaggggcgatgggacctcattaccaaacataatggaagatttggagagattaatctcttgccctgatgccccgccataagagcggataatggcaataacttctttactttgttgggcattggcttggcagaagaataaactatcatcagcaaacaaaaggtgagagactcgtgggttcacatatgaaattcgaagaccttgaactttgccttccctctcggcctttttagtctaagatataagtgcttccgtacatacgataaacaagtacggagaaatggggtctccttgacggattccacgcaatggccgaatacgaccttttggctccccattaatcacgacacggtaagaaactgaggtaatacattgcattatccagtttacccatctaggatcgaaacccatcttttccatcagagctcgaagaaagttccattccactctgtcgtaagccttactcatatccgtttttagtgccataaacttttttcggtttaccgggttcagcgtcgtgcatggaagttcccctgggcgatcaacggtaattaatctttccgcgacaaacgcagattgtgtctcggatatcaaatccagaagaaatctcttaaggcgcagactcaagattttcgagattactgatataggtcaaattgccctaagatcactctctcaaataagagatcgattgtagtacttaagggtcgaattccacaaagctcttagatcacacaatagactaaggttttgaattaagctaaactaaatagattataaaataaaaaacaaagaaaagcaataaatatcaagatgaaaatcagatgggaaaagagtcaggcttagggtattctcaggaaacaaatgattagtagatctagtaatagctaggttattatcgaaccattcttaaactcaaactctaattttagaataaccggtggtgttccgcgaaactcactatgcctaaagctaagattcccggtggagccgtgaaatcctatacttaaacatgcattattatcaagtttgattagttcacctaaatatctaaactgcctctacaacttcaaattcgtcactctcctcaaccttcataaactcatatccactttccatcgaagcagcatgccaagtagtagtgaggccgctcttagtccatctagggataggtctctctaagatcctctgctgaccttccagaatctgttccagcattcattctatcttgcttctaggtgcgggtggaagggggcttggtaagaagccagatcatagttccttgtgaaggtaaaactattgctattctgtagcggttgctggaactgagaattctgagtgtagctagttggaacattcccattgaaacttcttccaccaacataattgacatcctccacaagtagattgtggactgcgttaagcttagccattaacccggcaatcctattctcgttcgtgtttctcgcttgttcctggttctgtgattagacaaacacctgaaacacacaagaaaaagaagagagaaaaagtaagtaaccaaaaagagaaagaaaaacaaaagcttagactaaattctaatcctaatctaatggtgaatcgtagagatcttcgacaacggcgccaaatttgatataagtcaaattgccttaagaccactctctcaaataagagatcgattgtagtacttaagggtcgaattccacaaagctctcagatcacacaatagactaaggttttgaattaagctaaaccaaatagattataaaataagaaacaaagaaagcaataaatatcaagatgaaaatcagatgggaaaagagtcaggcttaggctattctcagaaaataaatgattagtagttctagtaatagctaggttgttattgaaccattcttaaactcaaaactctaatattagaataacttgtggtgttccgcaaaactcactatgcctaaagctaagattcttggtggagccgtgaaatcctatacttaaacatgcattattatcaagtttgattagttcacctaagtatctaaaccagagcccttctatgagcctatatgttctttcttaaatatttaggcccatctatgatagttctggtaacagatacctatggtgggtatacctattatgtaagatcaaattctaggtgatcaatctagaactagcattaagaacaatcaagatgaagaatcctatagataacctagcaaaggggcaatctaataaatcatctaaatcctaacaagaaagctactcaaacatatcatagaaacacaaatcatagtctaataagaaatcaaaagtcaatatatcaagagaaagagtaagaaagatcttctctaaatggagtctccacagggttttgctcccaagaataaaagagaaaaggagaatagcctctccaattttagatctaaacaatgacctaaaaatatatatatatatatatatatgacctaaaacgtgatgggccttctttagaaataaggaaaagttctggaccgaatttagaaatcttcaaaactttaataagttgcgtctttgaattgccgtcaggtattggtgtcgctcgacatcaggggtggtgtcgttcgacacctacgcgatttttagtctctagattacttctacagcataaaatctctgttttctttcagaatactccattatctccaaatgaattccaaacatgcaaagacctgaaaatgactagaaatgactttagaaataacaaatagactctaaaacttatacttaaatcataggtaaaacctgtaaaaatagggatatatcaattacctttatagcttacgttacataagctaataggacgaaaacctgacatttcgcgcggtttttcaccttttgagataagaaaaatatttgtctcattcaaaaatatcaaaactcaaaaaaatcttcaccattttggtgagatcaccttttattattttccaaaaacgttggaaaaatagggccgtcatcccatccggtcctggaacttttgtcggatttagagagcgcgcttaacttcctcttcggtaacttctttgactaagaactcgttcatggctggagagaccgatggggagatatccataaggactaaggaagggtcaaccatgttcgaagatgagaatagatttttaaaataatccacagcaactctttcgattccttcttcattatcaacccaaactccgttattatctagaatgcctagaatcttgttcttcgcccttctttatttcgttaaggcatgaaaatatttagtgtttttatctcataattatatgtatttttgttgtgcttttccaatgtcgtaaactcataatccctccagttttgaaagattgattttctaatattttcaccaagattaagaaaaataattaatggtggagtaatcaatttacttttgtggtactagtcaggtgatgttgctttccaataattataattacaccacataataaatgaggtcttttacatttcatctagagactaaaatcatactctttacgtttacaaatttagttataggagtaactttaaatttttgttaaaaatttcaaattaagagccaaaactaagtttctcaaaaattaaaattttagaatggagccaaaaccagtacacagagccgaccctgacctaaagctggtaaagctcaagctttaggcatcaaattttcttcaaaattttagggcaacaatttcttagaatggagccaaactaagttttgatcactgaatcatcttctacgtctagatcttggaatcgtcattttattttcttggagaatccgttgagttgtttaattaacaacatgggcctattgggttattctctctatctttggttgatttaaataggtattattgggtttgtaattgttttaaatgagaaaggactttttgatttggtaatttattgacgtgtgactcttgctaattgctatcagtttaatggttttcataattttagtaatacgtttaaaactgcatcttgccattttttaacttaaaaaatttggagtaaaatttggcatattctacttcgtaaaaaaatcaattttatgtatagaaaaacaatattcaatggacaacaaattttgtttatgctttaggcatcatcaagttatgggtcggtcctgccagtacaattaagttccattaattttctatatatattgacatatatttagaccatttacttaaaatcatcaatctatggctttccatagttttaatttaaatttacaacctcaaaatcatgaaagagaatttttgatttatttgaataacaatccaccaagagaagaagaagatgatcctcatatgaacttcgataaatttttcatttttttctttcacaaaacaccatttatattaagttatcgggaagagactatccgctagagagagccattcaggaaccgatgtgcttatatgggaaaaaggctatttcgagcccgagcttttttagctaaacaatcagctcgagtattagaagtacgaggaagaaatctaatacggaaagaagggaaaaaacaaactaaggatcgataggatgcaaattccgctgcaaaagtcggccaatcgtctagattgttaaagatagaaatcaggtctgaacagtcggaagcaaaagtgccagaagtatcgccaacagagatcatgcattccattgcccataggaaggaatcaaattctgcacgaagcggtgataagcttcgccgagcactcttgaggccaagatggaggattaagtcttgtcgaacaagggcccatccatgcccgcttaacgggtcctctgcatgctaagtggcatcaatttgacattcaggaagcaaggtgagcggtatctgagaagaatctaggaaaggagttaagcatatgggtacatcttcttttcgggttgcttgttcccaaacagttgtctctttgagtgccaaagccaaagtttcagggggaggttccctaaagttctcaaaaacaaaacgatttatacttttccagatataccaaattatccatggaaagagttccaacacctcctctctgattccaaattcacggcgacgccaaaaaaagaagtcaaaattatagaagagggaatttctagggaaaatattccccgaagaaagaataggcgataatgcccaaatctgttgcgaaggtggacaatgaaaaaggagatggttaattgtctcttcagcttctccgcaactggggcatcctttatccgtaccgatatgacgatatgtcaatctttgacaagtggctagacaacccgagatacattgccacgcgaaatgcatacgctttcgcgtagttttaagcttgcatacttgtgtttgaagtgccgaaacacctggtccctgaaaagaggggtcacaagtaggacgagatagatctctcgcagcctaatatcctaacttaacagtaaaattaccgtatttaatgtaagaccagctaaagccatcactcaagcggcttgggcgaatccctaaaatgagtggaatatcaacgggatcaagcaatgcttgaagacggtccaatttccacatctttgtgttttggtcgattaaatcattgacatagagtagggaatctcttatgtcaagaatgctctttacaggctttgcatggatagtgggaattcatggatcttcccatacgcgagtcagcattccggaacctatggtcctccgaagtcccgagacaagaaggggtttggcggccatgatacttctccatccaaaagaaggacgatttgaggcgccgatatgtaatggatcactatatcaaaaatatttccccctctagaccctactcaaaagagagtttgggaatcagataagatgccacaattgttttgcttaaaaagctagattaaactcttccaatgttctaaaaccaagtccaccctcagagtgtgggatgcaaagcttatcccatgcaatccagtggatactattactattcacattagttttccaccagaaatttgcaatagcactactcaacaggggataaaacacacgacttaacatatgtcggaagggcttgtgctactgactttataagaatctctttgcctcttttggacaagaatttggctgacaaggtattaagtctcatttggagcctatctctcacaaaggagaaaacttgggttttagagccatgaattttctcaggtaaacccaagtaagagcccatgcccccatcatggtggatacccaaggttgattttatggtactccgggtcatattgtccacatcaagaccaaacattacagacgacttagcagcatttaactgttgtcccgatgtctcgccataaatgcggaaaatattgatgatgtcttgaccttgagttggatcagcttgacaaaaaataagctatgatctgcaaacaggagatgcgaggtgaaaggacttgcgcgtgagatttgaagcccttggatcatgctattccattctgcatctttgagattcgccaccaaagcttccgtacacaagattaagaggaatggggaaataggaccgccttgtctaattccccttgttgtttgatgagacctcttggtgccccacctcgatcatcccacaattttcaatcatacatcagaatgggaggaaagaggagtccgacctacttttaccacccttcttctcatggttttctataacctcattaaagtcactgatcataaaccatggttcaaagcatgtgaggccaatacgagtcaagcgatcccaaactaattttaggtattgaactatcagatcaacataaacaaaagtaataaaaactaggtttccatcaataattgtttcaatatcaataagccgatcactaagaaaatcaaatttaaccggatagtctttcgaatacataaaagcaagactaccactattactagtaggttcaacagtttgaagagaatcaaagcctaatgatacttgaatattctgaagacgcaaaagatcgttctttgtttcctatagaaataaaaaacttggagagtacataagacacatctctttcagtcgacgagtagtaaggtctgcacccgtcccttgacaattccacgctaggatcctcatttcttagttttggagggagaatgataccctaccgtactaatatctgaagagataatcctattttttaagagaaaaaacacctcactatgagggatagttattgatgtgttagaaactctcgtctttaatttcaaagaacaatcgaaaatttggtaaaattgtagaagtgatatttttacagaagaggaatgtgggaaaagtctctccttaaagaaggaaatcgaaacacatggatatgcaaccatggatttgaagcagaaattgttatttgaaaaaattgataagattaacttttcaaaataaagggttaatattttcatttatttattttgattatattattatactttatgttcttagtaatttgatggagttattttatttttcaacattttagaataattctctttcagaattggtatttgtatacgttgaatttttattttttaggtaaggtgtgtacattgaatttttaccattatgtgtttgatagaacgtgcaattttcaattttattgcctcaacctattattatatccatgagtttatattttaattctataaacataccgctttgtttcacttaataggagtattttatttatttgattaatatttgtgactagagaaaatattgagattttacaagattctcaagaagctacggttcataagaagaaatgacagatagtgaaagagaggtttatcacgctttgttggaaagaagggttaacggaaacgtgaagaacaccactacaagggaagtgtctaagttgttatccttacctttacaaaaggttcaacgaatttggcgacgggccaaaaatactccttacggcgaaattgttgatgtgtcacataggagaaagggtaattgtgttctgaagaaaattcaaattgacttcgctcgagttgctgatattccactccaacatcgcaaaactctaaggtcattggcagcttctttgaatattagtcatgcgacattgtctcgatatgttaaataacgggtttattaagcgtcattcaaatgtcatcaagccaagtttgagagataacaatatgagagctcgactagcattttgtgtttccatgctcgacagtagtactatgcctaatcacccaaagtttgttgatatgtacaatattgtacatatcgataaaaaataattttatatgacaaaaagaaagagtcttattatcttctgccagatgaagaaccgctgcatcgtacatgtcagagtaaaaactttattgaaaaagtaatgtttttagctgtcatggctcgtccaagattgatggagaatgaaatgaaaaaatttctggtaaaataggaatatttccatttcttaaaatgcaaccaactaagagacgaagtagaaactgggaggcagggactatggagttaaagccaatgacctccatcaaaagagaagatataaaagagtttttacttgaaaaaattcttccgaaaatttgtgaaagatggccacaaaaagatttgagaaaacctatttttattcaacaagataatgcaaaaacgtacgttaatccgagagatgaggacttctgagaagctgcttctcgttatggttttgatttttgtttgatgtgtcaatcaccaaactcaccagacctgaatattttagatcttattttttttagtgccatccaatcactatagcaccgggtgaatccaaagacgatagaagatcttgttcttgcggtaaaacaatcttttgatcaatacccatcaaaacaagtgaaccaaaaaattttgacgttgcaatcatgcatgtaagaaattatgaaaatcggaagctcaaacaagtataaaatcccacatttgaagaaggtcatcttggagaaagaaggaaatctaccttcacaaatggcttgtgatcctattttagtacgagatgtaataagttgcttagcaacttaaggttttaataatcgtcttgtagttttctcattttatttaaatttttattatcatctgaatgcaaataagagaacatagagtgcgaaataggaaaaaaagttaaataacccaaccgaaaattatgagaagtacaaaaactaaaaggtctttggtaaaagttcttcaacaaatccaacaccataactttttccttttcgtttttgggatgaaacttttcttcatcttgttcatcatgtgacttgtttaaatcaaacttatgggtagtgtacaattttatcatgtaaacatctcttgaatatccactttctccatttccttcaattttttaactcttcgtgtcttcttcttgtttcatattgtttcagaaaaaataaaaaaaaataaaagataggaagttgttggagtactatatcatagaatatgctcataaatttatgtttaatattaatggactattgacctcctcattctaaatgcctgcaattaattatgtattgtaaatgtaaaaagcattaatgatttattgatttagaaaataaaaattatagaaaatcaatctttttgatacaataataaaattctagaagatcaatctttaaaatccggagggagtattatatttttggcttctcatgaatcaaagcaactggttgtcgctaatacacaatgttcaagaaagcgggctaggcggccatctaggtgtcgcctaggctgtaggcgctcctttaccgcttcaactttcttaaaatcggttcttttagacggcatgatcgatttggcagactatgcagtcattaaacagattagacgatcattaaacggattcatgcatgctacgtggatttaaatgtgtcttaatatttttgaatttttaaaataatatatttaaatttctataaaaagcctatactttttattattttattttatcttattttataatattaaatttaaatttattctcaaaaatttgataattttcagctttttataatgtgtttctcaatattttatgtaatagtatacaaatatatatcattttattctaaaaccgtttaacccgtctaaaatggtctagaccctaactgagtgttctaggcgctaggtggagggtctctgcccgcttagcgcctaacgatttcttgaacactcctgattccatgtaagtcaaatcaatgaaagattcaagctttgttatgatagatgctaggatgtaagatatagttcatatgagatgtattgaacaagaaatgtaaagacaaaaaaaaagagatttagtttgtcaccaaagactttaaatttgatttcataaaatgggaaagaggaaagtttcttacaactctctagattaacaatttaatgttcactacaaaattatatatacgtatctactttcttagacttaatcttatatactaatgggcttctcatgatataagactaacttttgggctttatatggatcctctaatatataagaccacttgtcatgacaattttagggttttcttgtaagctttaaaactttttttgaacaaaagggggtttcttgtaagcatcaggccagcttagaggtctacatttttttttcaaatgatttaaggtcataagtttttaagattttgtaataagggtcctaaattttaatattttgcaaataacaccttaagttttcaggaaaaaaaaatttaggcacaaggtccaaaaaaaaattgagccggccatgctaagcatatacactatctcatcgctaaaacgaagatgtaccccaaattgtttttttcattaacgtaggcttcggctttagcttagggttctgaccatttttttcttttcttttcatcacggcacaaacacacaccgtatataaagtaatactgcggcttaggctatttagagttgatatacttgggcctcacgttaagattttaagcctcgacgaagcccaataagagacactcgagatcgtggtgttactaaaaactcaaatatcaagccacaattcattaaattcaaccctaaaacaattgtaaaacatttcataacgaaagtgcccaaaaagttatagaaacttttaaaagctagagacaagaggacccgtagatagattcgaaatcataagagagtttggtcgttgggtgttctttcccgtgtgtcggcgttaactaacgtcgtcaacattgacgacgcaaatttaaaagcacgacaaaagcaaaagatgattcacgtgttatccgaggatgttttattttagacgacaatatttctattcaattttgtcgacacatgtaaattaagatataacagagacttgtagtcgtcgaagataaaaagttatataattctgtttgactgttttaaatattcatgaaattcaactcttcaacaactctttttttgacaacttattttggatatattacaatcttcttttcggaatatttaagccattcccgagatgaagaatttatattttcgaaaaaggaattactagatatagacaaaagctgttaaaagaaataattaaaaacagaagaagaaaaatatagagctgataaatatccaacaacttaacaaaccaaacacacttccaaaacagtcaccggtcaaaaacaacagaacctatctttatttccttcagagagagagagataaaggaaaaatcttttgttcttgtctgaaaaaaacctcacgacagatcggaaagagtaagcttatcaagaatcattgttcaatcagacaagatctgtaagaaaattatctcacagttctttgttacaattttttttcctcaaattgtttttgaaagggttttattatgcggttaaacatcaacaaaatctctgttcttttatatatatatgaacaaaaagagatttaagaaaaaaaaatagatgataccttaagcaatactatttaattgaagtatgtttagttattcatattaaggatcttgttttcaattatggtgaattttgagttaattgaaatgatatttgtgaataactttaatgaagaatcttgtttttattttggtgaaatatgacagtaagttggaatgagaagagaagtttttgagtcggtgagcaccaatgcttctaatgaaagggttcacgtggctcccaaaatagcggcagaggaacaagattatgaggagaaagaatgcactgaggagaattctctctctcagaatcataaatcttctaatgtaatcacagaggtattgtataaagagagagatggtagttgaatgagatttaaaagtggtttttgagtcttttggttcttgattgtatcagaatgattcgaagaagaagaatttggatgaagaggatgattgttctgttgcttcttcgatgaagaatgctaagtctaaagtaactcatggaaccgctccacgatttaggagtgctcagcgcgctgagaaacgaaaagaggtaacttcatttgtgttaacataaactagtaatctatgataagttggttatattctgttttgttcactgactttgaagtctttttgtggttttagtattaccaaaagcttgaagagaaacaccaagcacttgaagctgaaaggatcgagctcgaacaaagacaaaaggcaagaatcttttaagtaactaaaccaagaaaatgtattctgaaaatctaaaatgggaactcaattttgcaggaagaacaagaagcagctattaaacagcttcggaaaaaccttaagtttaaggctaatcctgttcctgacttctattaccaacgacctcccgtgaaaccagagcttaagaaggtattaaattgttttcaagaaaatttctcatatttgttaggaattaagattatgtaacatttttcttgtgtgacaagcaaacttacgaaatgctcttttatgtagtttcctctgacgcgtcctaagtcgccgaaactcaatctgtccaggagaaagagttgcagcgatgcgattacctcgtctggtgaagagaattcgaactcacagaatcgccagagtgtggtagaatgattgctctcaaaaagcttccacggagtaagaggtttccataacctaattttactagaccggagataaccaaacttttatttccggttatttatggtatttgttcgatttcacaatcgttgtcctccaacgatttattgattgttttttgtttttcacgtctgtctctacttgatttctgttttaattttacgtaacgtttaaatctgaaactgtatattgaatgtgttgaagaatcttggtgctaaagatagtgttgattatatcgttcgttgatatgtatggactaataatacgtttgttgtgatttttttgagagttatagagaataccaaaatagtaactgtgatctcactagattttataccgagaaaaaacaactccggtttattagtatgttcatgttgtaatctttgatcgttgagaacttgaaatcatctttgacaaacctccatattgtagaatgctctcttgtaaaaaatttaagatagtgaatttttggattctgatcaagccgagatagtaaatctatactctattcatgtgagtttcttgatcaaatcttctccaagcttcaactttgaactgtggtgatcgaggcgtatgtcgatcgtgagagacttcaacattcaatcaataacgagccaagattcagcaaggaagcaaaagacttctttcaatggaggaaatcatgtgaagaagagattgattcagtcaacaagaacaagacatggttcattgttgacaaaacaagtgaaataaaagcgattggtcttaagtggagattcatcactttaaatggatgggagattcatcactttgatgggaagacatctttcttacattgagagctgaaggaagacgtgtgtattgatcaatatgaaatctttgaagaacatcaaggagaagatggaatcaagattgagcaagaggcggatatcttgactaaggcattgacacagatcaagttcaagacaatgagaagtttgtttggagttcaagacctctctaaagttaacttgaagcttatgggggagaatgttgggtaaacttcaaagttaacttaaggcccaagtagtctttaatgaggaggttaaagactaagaaaggcctagaagtttctattaggtttaggagttatctaagtcctaattgtaatacgattagcaaagttgtgcctcctatatacacctcttaggttgagagagagttttctaatcatcaataaaagagagttattcttttaaagcttgttcttgtgttcttaagaaactttagtctttgccatcgaaacttggtgcttttcctcgtagatggttacatttcatttatggggttatgttattctttagtttcaagattaacttcagctacagtaccattaaacttaattcttaaagagtttgttattattttgcatggttaccttctgatgggctttgagtactaaaatcaattggggaaaggaaccaaattatatgagtcaccagtttaactcaacaaagccaaaccaaaacaacttctagattatgcatatctaacttaaacctatatatagataaagctgaagccaaattgttatgcacaaaaattcgagtttgcaaagtagaatatacaattgaagaccgttactacaatcaatcaagtatgagctgattgagaagagagtattcttgaatggttatgctcgccttcataagtcacaataagcatcgaagtttcttctacacatcgctcaacatgcttcctcgctggacaaccgcgcacactgctacatttatagtatcccctgcaaacaacaaaaacaagaaacaaattataaaccaaaacatataaacaaagtccaatgtttttctcttcttgtaatgttattttacctaggatgaggagaacccttaatcggcttttgtccgtatttcctccatgaatattcatcgggaggtatgtccgcaatcttgttactgattgccggtactttaatcgatcgtttcacccttaatttcctgtaaacaaacaccaaaacattgaaataaacaaactcttagaacacttttttctcaaggaagaacaaaaccaaccttttcttggaacaatggcatttgcttttacttccacattttaaactaccagagcaactagtcctcctagaatgttgcgatatatgatcggaaccttgaggtaatccaatcaaatgaaaagagtttctatcgtaatccgtcacactaccatccatactaagagatgaaacaaacgatcttgacccatttgatatacttggtgaataacaactagcaccaatagacccatcaaactttagattcaaaccacttttgctccttgagtacactccttgctgatgggtatgaataaactgataaggttttggatcaacagctcgtgaagagggtggcttcagctcgagaaacgacttatcaagacacatattctggttaaacaacatcaatggaggaggaccagctggtacaatctgaagaggctttggtgctagaattggaatacaaccacttatagcattattactgcaaacaggactctccaaaaacatgtgttgtggcaacaaagaagagctaaacttgtagttgttgttgttgagtttctttatcttcctttgacctaaccctctagacaaaagagaggagactctcttgaacttgcaaacagcttctcttgtttcaaccattattgatttggaatcattggtttgttgtgataagagattcaatactccatgacaactttccactgctgctttgtttgcagcttcaacttcttccattttcttcttcacaaaggatacttttaaaaaacgaaaaacctcaaaactcaaacgctaaaaaaaactatttcaaaagaaaagaataatcatcatgagctagctcaaacatggaaaccataaaaatcaaaataatagctcaagaacaagggttaaaagcagaaaattgttctctcactgtaagaagaagaaacaaatattcttctctcagtataaagcaaagcttcgagattggtgagagaagggagagtggagatggtcgtcactcatcacagtcacagaggaaaggagagaaaaacagagttctctgtaaaagattttcgtggtgggttccattactggacctactttgcatctactttttcttttcttttttctttggaaataataatatttttggtgacaaccaaataatgttctgcataaatattagttttgtgataatgtgtcttaattatttcttatttatgtatactagctaactctttatatattaactagattttgattcgcagtataccgcatgattattttattttttaagaataaaaatttaatttgtttttttgattaaaaatatatatgatttaatgttttatattttctaaatgtattttctgaatgtataactcttatatctatatattattaaatatataattattatatttgatttttactattaaaaatgtagaaacaataacataccattcattaaattaaaatttagattataactaaataatttaaatttaaattatatttattttactaatattatttgttttgtttaatatttaagataatataattgtattttgattgttttatttaggatttcacccgtggtataccgtttcgtattactatcgatccaaacccgtcctaccatctaatctcgtacgacccaaattcagtttgataaaattaaacattattttttcttttttgttcaaataatatttttattaaaagatttataattcaaattaatttaaaagttttcttttgaaatgattatttgattttatagatttcatatattataaacgttttttcgttaaatattctaaacattttataaactttaaataaatacaatatttatttttaatgaaatataatattaataaagtcataagatttctcctttataaaagtaattagaaaggaaatattttaagaaaaatagatttttatctttatgtgttattaacgaaaataacattagttaataggatattcttaattcatttaaataattatctaaatgatatttttaactcatttaaataattatctatctttattaaaatatctagagataatgtcattagtttgatatagacatatctcaaacaaataattaagcaactaatctttccaaaataaatatacaacagccgtatattataaacctaagaattctatatcaacaaagacaataataggttagcttaaaaaaaatgaaataataggtaagctttttagaactaaagatcatctttaataagcccacttcttaaacaataagtctaagataatgaaataagttttttttttctttttttttgaaatcaatgaaataagttttaacagaaacaaataaaatgtattaatcaaaatatttttaatgaatgacaatttcaatgatgtattatgttgagaacaactgaaaaagttgatgtgtcatgctagaaaaaaatgggtcttattttagatgtattaatttcatagtacaaaatttttcaaaggataaaataatatggttaaactaatgcttgaccttaaatgataatatatatgaaatagaaagatattttacaccctttaatctctattggtaacacattaaagacattctcattttaatcaccaatgaagacatactattaaatgataatatatgtgataatgttaagtagtactttttcaactaatattaataccgcatcatatcaactaaaatttgtttagttttctcgataattagcagtaatttacttgagatgtagaaactgtttcaccgtcacctctctattcttcagaatctcgagtatgcaacttggagaaatgacagttaagatctggacacatgtcaaggtgtgtccgtttttactcgtaattcgtgtagcaagattgttgactgaatatgcaatattgtctattttttgtcttatcatgaaaatggaaactttcatacataaataacataaatgattaataaaatttaaaagctagttgctcttaaatcaaaagtagacaattacttatgttctctttaatgaattaaaaattaagaaaaattgatgtagcactgctaggggtgtcaaaatgggtcaaaattcatgggtcaactcaactcaactcaacccatgaactctaatgagttatttttttttgactcaaatgagttgatgggtcaaatgagttattgggtcaattggtttgatgagtcaaatgagttgggttgtaatggttaatggtttcaatggtttacccaattaacctatcaagttttgtaaaattgaattaaaccaactaaaatctctaaaccaatgtcaatttaagcttaaccaacacatctaaaccaatttaataaaatcaatatttttccaaaatttttaaatgtacaagcgatgaaattgagaaaaagtaaactcgtaattttccaccaaaaaacataaacccgtgattttcccgccaaaaacgtaaaccggtgattttcccgccaaaaacgtaaacccgtaattttctcgccaaaaaccaaaacctgtggttttctcgccaaaaacgtaaatccgtgattttcccgtcaaaaacgtaaaccgtaattttcccaccaaaaacgtaaacccgtgattttcccgccaaaaacgtaaacccgtaatttttccgccaaaaaacgtaaactcgtgattttcccgccaaaaacgtaaacttgtgattttcccgccaaaaacgtaaacctgtgattttcccgctaaaaacgtaaacctgtaattttatcgccgaaaacgtaaatccgtaaaaagtggaattcgtaaatattttaagtttgatgataatggattaataattattaataatgataattatttattattgttttgtaataataattaattaaattattacttaaatgagttaacccatttaacaactcaaccaatcaaattaaatgagttatgggttgacccaacccatttaacaaaatgagttgggtcaacccataactcatttaaccctaaactcatttgattatgagttgagttgagttgggttacccattttgacacccctaagcactgcataagtattttcttgcgtttataatatattttctaaataatttttttttaacaatattataatcgatataaatatattagttaaaataaattagcaataataaattatttctatattagctttttattctagtttgatatagattccaaaaagagacgtacgattcaactgtaaataaaatgcagtgcgattcaaatagtaatgaacatatatacatgcatatatatatatatatatatagtgatttttgttattattgaaatagcactatactgtgcggttttatcaccattcaaaacattctcatttttatctttaaatgtttcttacaaatttaagaacaatttttggattcacccttaggagtgaatatctcctattcacccattttggttaaccaatcaaaatacagcaatatgtcatatcatactacatttaaaaataaatcaaaacaaaaaacaatttaaattaaaaaataaaatttctacaaattcataccgacttataattatatttaattataaaatctaaatcttatcccctcttttataaacccaaaaccgacatataattttgtttaattgtaaaatctaaaccctaaacctattttttataaacccaaatcgacatataattttgttaaattgtaaaatataaacgggaaaaatgttgttttatacgtgactttaaggtcggccaaattaaacatgataaaaacgttgaccatccattttaacaaaaacaaaacgttgacctggctaaaatcccaaaacgttaactcgcattaacagacccgttaacagacgttaatgagttctgttaaagtcgaaaacggcgtcgttttgtactaacaaaacaaagctaaattcccaaatcgaaaactcaatttggtaattggtaaaaaagttcctccgcgagtgcgccaaatgggacgacgttggtcggagattcctagttttctacatggacggcggcggcggtatcggcgagcttgttcctactaaagattccgacaatgttcttgaggaagtcactttggtcaatgacgttgacctcgccgataactcttccaacggattcgttatcgaccgccaccgaaaccgtcttctcctcgctgtcggcgatttgcttggaaatcgttatagtgctttagttgcctatgatttgtccacgtggcgtcatctcttcctcacagtgcttagcagccatagtaagctctctctaatcatttgttgattaagcaaacaaatgatttatgttctctgttttagccaaatttgagcaacgtaagtaaagagataacatacgcagacgatgtagctgttgatacacaagggaatgcttatgtatctgatgcaaaaggaggtaaaatatggattgttgatgttaatggaaagcttgtgtacactattagaagccctctcttcacttcacctggttggtataataactttgtctctcttaacggcattgtttatcatccggacagattccttatcgtcatccacactttctccggtttcttagtagtaaagtcactatcattgacgtttctggtggcaatttgaggtttggtgatgggcttgagttcttgtctccaaccaaaatttccaaatcgaaaactcaatatggattgttgagagaattagggatttcgatttgggaattttgatttgtttcgttagtacataacgacgctgttttcagctttaacagaactcattaacgtctgttaatgggtcttttaatgcgagttaacgtttcgggattttggcaaggtcaatgttttgtttttttaaaatggctagttaacgtttttatatgtttaatttggccgaccttagagttcacgtattgattgaccactttttgaaagttcacgtataaaacaacatttttccccaatataaaccctaaacattcttcaataaactcaaatcgacatctatttttttcccctaaccattctattataaacccaaaccgacatataattttgtttaattttaaaatctaaatcctacatataattaaccttgtttaatcaaaagtatacatattttgttcctttaattattgtattgcatggtataatgattgatttaaactaaaaaaggtgggttcacccctaaagatgaacccaaatatttttcaattctttcttgtcatcttagatttattatttattgcaaattatgagaactgttacaaagttttgcagcgccaactagacgcaatgtggcagagagtaggcacgtgggcgggtcccacgggacgggttgttcctgtgacccttattagatccacaacagacgataccttcttttcattttccatgctcttgatggacatcttcaatgatcttctctgtatagaatcctggcgaacagctataattgtacatctggttaagaaatcgcaatatctaggattcaaaccccagacctcttggtataaaagcattaatgaacccttggtcaaccaatggaccaaagggcgtttcacgtctttttcaatttttaatatatatatatatatatatatatatataattagattatttatatattacaacctcaactttaacatcttcatgttcgtgtttatcagataattttgttcttttttggattatttattcttaatatctagttgataaagaaaagttgagaaaaacacatctaaaacaaaaaagcatacataataaaaggggttgggtgtgggtgtggggtatgggggggggtcgatttctctctattctctctctcaaatcttttagagagagagaatcaaatatccgtttcacttgtgttccatgacttcttcaagcggatttctgtccttttttatagttatcgttgtctgttttaagccgtgatcggtgtcctgtgacttttccagcaccgttaccggatctctagatcttagtcgtctatttctctgttttatcctgacattttggtttgttccgggttgatatacggaatattctagctttgccgtcacaaccttgccgtcactattccagttttacactggctttgttccgacttatcccattctttggttttgtttgtgaaatcggtctttctcgaaggttttgactgcttcctctccagaatccactggaattcgagtctctgatgctgaaacaaaattccgggattttggatctaatagatcgaatcagcctttgacttgaattgttggaagatgatggttattgaaacaatgtcaaggtcttccttctgtgacatagtgaataaagaaggagtctgtttcttttatctttctattttttttttttttgttttagttaggtgtttcaactctttcttttgctaaacaaggttttggtgttgagatagtgagcaaaaagcactcataatgcgagcatatatagaagcgataagatcagatgtaaacttttaagtttcatgtttgatcttattgtgatttgttatgagttttctattaacaaactactattttactcctttctatttagtgatagacaatgttgcactttcttttgtttgtttggcttgtaaatttacctgttgtatattgtacttgcctctccaacttggattctctaatgatggatgatatatattaaaaaggacgcttttggaaaaaagaaaaaaaaaaagagcgagaacaaaaaaagatattttctctctattctctcttttacctcctgcatcgtttgttttagtcaccaccgttaacatctacgccgtcccaatttctttaggttttaggacttctccctcagatagtatccttttgggtggagcttctaccagagatttagaagttttatgtccggttaaacaattagtgtttaagattctacacaagttttgtgggtttggatttcttctagatcgtgacctttcattttctcgggttgttatggagtttcagttggataaagttttacaagagatgttgcttgaggaagaggaagatgatattcctgtagttatatttggatatgccagcgtttagttcatcaatttgatataagcggagtgtgttgggacgatttctgaatccagataaccaacgaatgtctaaatagattctagagatgcctcaaatctagcgcatgtacaatagagtcatgggtgtttctttgtcacgagatagctttcagttcatcttcaaaaacgaaaaagatcttatcgaggtgcttaagacatgggtatggacccaagatgattagggtgttgttatggacatgcagattgaagatcctccgccggactatctcaattttcttttttctcttgatacgacttcgcatatacccgttaatcagtatactaggcctacaatttcttcggttgctttgtatgttggtaaggtgattgatttcaccttaatgaaggtgaggcacaaattcaggactttgtgaggatacatgtactatttgatgttcgaagcggctaagaaattctagagatattcaattgttgtgtgggtcaatggtgaagtttgggattgattatgaacgaattcataaaagatgcctccactgtcaacgcatgacgcatgataagactcgtttccctttcttaccattgacgttagcacaacctacttctgagattaataaaggctatacaacagattcagtttcagggtccgaatggtaacaacgtatttagttgtgcgggaaaagcggttttatagtacgatacggttcaattgcggtacatgcgggagaaatagatttacgggacaagtgccgtttttaaagaataagcggtacaaaataatgtttgattggtgaaataaagtatttgcggtacattataaatgtttgaatggtaaaaaagaaacaaagcagtacagattacatattaaatattattatatcaataattattataattatatattattatttgtttgatgttaataaaaaataggtcatacagttattaactttaaatattcatattaatccaaaataaaataaaatatataatttttaacgtacatattgttaaataatagttgaataagaaaacaattacatcacttttacaaaaatattatcgactactttgatttttccataaaatattttcaatattgtctcttatttgcgtcatatgttctccatctgctaactatgctgcatccatgtcgcttacatcatgctcaaaatctcggttgtttatatttgtttctgtcattacatctacaaaatctgaatccaaaaaatttgaacttctcataaaattatgtaatctcattgtagccattatcactcttttttgaatgtgaacattatatcttggaaaatcagaaataattctccattttttcttccaaactccaaaagttctctcgataacagaacgtaaagatgtgtgacattggttgaataattcatgtgtattcctaggaggaggaccataatagaattgagacatatgatatctcacaacgcggtttcgggatgatctataaggagccagaaattcttatttgtttggatagctagaatcaacgagataatattttttgtacggagacaaagaaaactcagaatcactttgtgtgccatttgcaaaacagttgtatcgtggcatgatcccggtgctccattccaaatatctgtaaataacatattcaaatcgcatattgccataatgtttaatgatgcattatcatgtccattccaatacattccttgtaactcaggctttacttttacacataaaaaaggatactttttgttaatttacatctctaaaattatagaatcaattagatttttataccaaaattttaaaagatattttgatgagtaaaaaatttatatgtacttacaaagtcttgttctcttcaccatacgtcagatgcaaatatcattgatgtctcaggatcaacagtgatgccaattttatgcgtaagaaacttccatctcttgtaactttttttgaattcatcaaggttgcttttgaagaaaacataagttttatttttgtcgaacgcttgattaaacttttcaaccatatactctaccgatagaagtaagatgcttaagaatataattattcatggcaattgcttcgtcgaacaattgtattaatattttttcttgaatgtatgaccatttgtacttgtctttattctacaaatttagtgaatacaatgtaatttattatgtcaaattttaataaatatttttctttacaaaaaatagaagtaaaagtaaatttacccgcactgttgtttcggagggaggagctgaaacttcaggatgagttgaaccgattcttgtggaaggatttgtgttccgtcgacgattagattacatatctaaaatcatttaaatcgaaataattttcttgaaacaaatttgataagctattaacatttattttttgttttattaataaattcaagtatatgtattcaagtacaaaatatatttaatatatataaacgtattttatataaaataactaagaaatgatatgaaacattacaaaattgaaattgcttacgtaattaacggacatgtataatttagacaaaccaagttaagtggattacaaatcagcgaataatattaatttaactaacacatgcaaactccacgatttatatttgtcttaacaattgctatgataattaacattctttctttctaaattaagtaaatacataacctattattataataaaatttgaatttaaaaccataaatttatagatatggaatcaaataatttcttttcaattattagaaacttaaaaataaagatatatatatctaatagagatgatgaaatataagattctacaaagatataatataattattaaataatagctataagtatagattaattaaactagtaatacatgaatgttctaattaattattactatataaataaattaacaagagagagaatcatggtggtggcgttaatttagtctaaatagaaggaaattaatgagatatcttgaagtaattaccttaaatgtagaattagttattgaggattgaagatagtttaggaaaaataagtttttgctttcttatacagaagagagaaatgtgtgtataaataggaaaactcttatattaaaaaataaaaaaaaataaagaaagaatatatttattactcattggcgcttttgtattggaccacaagtaaaagcatgggtctgattttgaaacgcgttccactccattatctgtctaacaatttgcgtttttttcatttttttccgaaaaacgttaaatattatttaattgtcttgattgatgttaaagtgcgtttttcaaaaaaaaaatcaattccgccaatttaatgttaccaatcaagacctcagctaaagcagtggactctcatatatcagtttctccatcaaatgggcaacctccagtaaagcattttgatgatgccatcaaagaaaatttggtttctacatgtgtgtctgcatcagttaaactccttgttaaactataaattcactactaaggggtgtaggatctttgaaacgataattgcccttggcttgatctgcagattaattgggaacagcttgtcctgtgggaaggttgttaaagggtgaggtctttggttcgaggaacgccaagcgcaccaataacctacctggtggatttggtggcccaaggagagaggttagggtcgatgcgctgcagcgccaacaggatgccacgtggcagagtaacaacccgtcccgtgggacccgcccacgtggccacactctgccacgtggcatcctgttggcgggtcccacgggacaggttgttacagaatgtctcttgattgttttagatcaatatgtgacataatggaaacaagttatggattacaacctacattgaatgttagcattgaagagtgtgttgccatgtttttacggatatgtggatacaatgaaggtcaaagagatgttgggttgcgattttttgaaggccttagagtgacaaagttacttgcttgtgattgtatcaagacgccaacaacacaagaactacgtcgaattcatgaaaaagtacaaatggatcgaagatattggtcatattttagtgatttgttggagctatagatggagttcatgtgtgttaaggtgaagcctaaactacaaggaatgtattggaattgacacgatagaacatcatttaatatcatggccgtatgtgatataaatatgttgttttcatatgtttgaaatagagcacatggatcgtgtcacgatacagtagttctaacgatggtacaagataatgattatgaatttcctttgcctcctagacacaagtattatgtagttgattttgggtatccaaataaacaaggctttttggcaccttatagatcttcgcggaacagagttgttaagtatcacatgtcacagttctacaatgttccttctcttaggaataaacaagagttgtttaatcgatgtcatgcatgaaaaatcaattgaaaggacaattggagtttgaaagaaaaaatggaggattctttgtgaatttcccagatatgatattgatgttcaaaaaagagtggtaacaattacaatgggactatataattttatcaggatttcgaattattttgacgagaattttgatgaaggaatgagaaatacaaatatcaacaacgtaaattctgagaatgatctagatgacatggagagaggtggtatacctgatgaaaattatatggcaaatataagaaaaaatattgttgatatgttatgggcaactcaaaatacacttttcgttaaatattgcacgcggtatccttggtttactcaatcatcaaatttgaatttggtatatattacgaatctactatattttttttgtcagtaaatatgtagttgtatatcatatcttaatggtatcatttaaatatatttagtctcctcagcttgtattttgtttactatatgtagtctcctcagtaatatattgatatgtacttttgtgtacgtaattgtatatttagtatatgtagttgtacacattgtatttgtacagtttcgtgtattttattaacatgtaaattaattataaaatttgacaatttaatacttgaaaaatacctttgttcaaactcatgattataaaagaaaacaaagaagaatataaatagactacatactttttcactggtattaaaaataggaagcattaaaaaaatgacgaaacaaaagtcttataacaattattccaacctgcaactacaaaaatgtttaaattagcatgttataaaattttgtagaatggttttattttagaagaattaaactaaataattcatacctgtagaattaatctactaaaggttttgaaatatttgtttgaaaacatcatttgctgtttttttcttctgtttttctttactgtctctaataagaaccttcacccctcccattgatttcactctagacatagcgacatatcactgtccatgtgagaaaacaggcttcagcaaatatatgccaacattgggtaatgactggccttggcttttattgattatcatagcaaatgcaacggataaagaaaactgtctccgttgcattgtaaagggcaatctactatccgaaggagttaggggcatcctcggaataagaaccagtttaccaactctagtacctgttaatagacgtccttgcactagtttatctccaagtctgacaatctgaagtcttgtaccattcatcaaacctccatacggatcaagattacgcaacaacataactaggcaaccaacttttaaccgaagtagatggttaggtaatccagaaagcttgattttattgagaaaatcaggcatatatatacagggttcttatctgcacgtgtgtcagaaggatcaatagaatcagaactttgataaatcctttcttcacctgaaaagaatagtagttcattgtcatatacacttattggtaagagctgataaagttatatgtatgtttttgagtaataaaaaaaagggcattcactaacctgttagtttggaaagcatatgatcgttaattgagttaacatcttcattgatgggacacaaaatagctctaccttgggaaaccgtaggagatttctcttgaggaaaggttgtaccatagactgctctaatgatcgattctatagggttgtctccttcaggaataagaatatcatctgatatttgtatccgagttactccatcgttagctcatttagttttccctcgccgactgcaaggatccatttggaaaattcctcaatctcgcgtgcctcatttacgtatatatcttggagatgtctcatgttcttcgtcaacttcaaaactttgcaatgctgccaaagataagacgaaactccttatctttcccattccacgtatagaaattaggtatttgttcatataaaaattttgctgcttcaggatcacgcttattaagctccaaccatgccataaactgtgtgtcatcatgttcactttatacaaaacagattcagtagtctcaccgtccttgacataaaaacaggctgctaggcctttctcattgaacataagtttagttactgatgtttgtcggtaatctatagaatagcctttaatcgtccccatcgcttcacatgcagatacgtatcggtaaaacgattttttgagttatttttcattaagtgtcatcttaaaaatagtctcctaagtatgtttaccataaactgaaataaaataatgaaaaatacctgcaatcataataatcatgaacttgatttcgttcttgtggatctttatttgtttctcctacattgttttgctcggtgacatcttcttttcgatgaggcttgatagagacggttacacgatcaaggtccttgttaacatacttgaataagtatttaacaaagacggattggttacaccactctacattgatgtgagccctgtattttcgtaagaagacatcgttgtatggaataacataccaattgtcgtattgaaacttattcttctcgatgaaacgaccagtatctatgcgtctatatatttgataaccttcattgtcaagagacgtgttctcaacatggttctttggataaaacttggaacatttatcattttccatgcatagcgaattaggattaaccaatctgcatggtccatgaatcacacattccgacacaatttgatataactctggatcttttgattaatctggaatttcggcaaaaataatcttgtcaacatcatcaactgtaggaaacttgtatctaggatccatccaaacgatgatgtgagcatgtggaagacctcttttttgaaattctactgtacacatagctgtttcaacataacaagtatgagttaatgtcacttgtaaatgaaaatacatgaaatatatgatttcaaaatatgaaatcatttagtacctattttggtttttccaaagacatgattctttgttagatcatccatcaagttgtcgaatttcattttataaatcctgcgaatgatatcaggcatgtcctcagaattcaaattccgctctttaacaaatcttgtgatctctggccatttaggattacatgtgaaggtaataaacaggtcaggaaagccaaaatgtttacaggtcgtcattgcatctaagtagttatgctacatataagctggaccaccggtgaaggatgaaggaatgatataactttttcctttattagaaagatcattatctttagcatcaaaagcatcttgaactgccttcttgctagtactgcgcaacttcgtttaattgttttaatatactttagccgattagactctatcatagtaaaaacatcaaccatgaattgttgaagtaaacgctttgagcgaaagaggatgtgcttctcatcttttctctcttgtaaacggtagtcaaaccacttcctcgtactaacatcttcctgcttcttctttccttttgttgttttggtaggagttttttttattccaagcctatatctatcctctcctttgggaaataacaatgaatactgaagtgctagatatgaaacgtgacagtcatgtattctccttaacttacgagactttatctgtaggattatatctcttttatctagattctcgtcgaaatctccaggtatcaatgcaacaacttcagctacggatggaaggttatacactctgcatctttctggcgattagatataatcttcatatgaaaattttcctcttctttctctatattgaatctattacgggcaatcctaaatgcaccaacatgagggtttatcttttccaacatttctagcaaagctgtaactgtttctttcttgaacttttctttgcccccttcgttcccaccattattacctttgttgcaattttggataattacaaaagacatataataaacaatatgtattggtgatacacaaaatataaattgtttcataaagttcaagttattaacacttacttcataacttcaatttgattatcaacttcattctcagtgtccatgatataaagctgttggaattttgcataatcgtcagcctttggtttcaacgcacctatcaagtgatagttttctccttgtagagcaaacatagatggaccacgtctcttttttactgagcgatataccttgccaccaatagatgtgactgaaaacaacatgttgtatggtctgatatttgctctaaaagttttagcatcttcatggtagcttgtaagcaatcaccacatatattcaggtaatttttttagcataggtagaacaatctgtctttgcatacaacatcctgtaaaaaccggattgctactcctccttcttctatttagtcttttatcgtaccagaaagttgcaccacaatgcacacatgtgtgatccgcatcaccttcatcattgtaacgcccgtgaaccggaaaatctgttaggatttgtgtttaaattgcccggtttaatcggttgggttaatagaaatcttagagtatgcctataaaagaaggaaactcgaaattagggctttgcttagccacttttcgttctgtaaagaagaaaaagagagagacggagaaggaccagaatcgttagagtttgggaggaaacagtttcgacatatcaaatcgttgtcaaagataacgaaatttggtagcgttattcccaagtctttcattgtcattctaaattttacataagtggatttggatttaaactcgctgagttattttcagtttcgtgagacacgttttctcagacgcgagttaggaccagtggagattgtaactgagatcttggtcttgtctggtttccgatccgcacgagatgtcgtgggaaacttcgtgacgtcttaggctagcttttcaccggagggatttgatagttaacggttggtttttagtttaggttttcgtctttgagactgtttgtttttgatttttatgtccagtttgcttttggttgtgtggcttgttgtaggacgtttctggactgtttcagacgtaagaagagtctctcctagttatagttgttgttagaatcagcttgttatggtgagtgcgtgaccatgagcttatctgagcgattggtttgtatgacttgttttgtgtgatgatatgtaggtgtggtgaatgtgtttttgggtgaacggttcaatgactggtttgttatgttttatttatggttataccctttatttacttgtgtgtatagctcgtagatgggaggatcgcctcactaagtatttatgataatactcacgcatctcatttgtattgttgatgcaggtaaaggcaaagtgtgattgtggattgtggcaaggaagagaggatgatctagacactcgttgtgatgtgatcgttgtcgtgttttatgttacctgaatcgaacaaaatcaataccaaagttattcgataaaatgttaaataggtttttccttcgttttaatctatataaagtttatttaaaattattacctctagttgatgaactggctgccactttttttgaagctgcagcagcaaactctttgtttaaattccttcttaacaaatctttcatgtcgaaattatattgtggttcagcaacctgattgctcggtgaatctttgtccgactcataatcttcttgactagtacagtcaaatatatgatcgtcgcattcctctaacatatctgtaaatagaagatgacatgaaagtagcacaacttaaacaatttaaaactgattatataagggtagcatctaaataattatgattaacattatagcactatcagaatatattggtttagaatgatcactttcttcatcattgagggtaatgacacgtacaatacttgtagaattctccttcgattgtaattttgttgaatgtgggactccttacaatcaccaaatcaaaattttaaatttttttaaggaagtaattatataatttcaaactatatatcaaaattagacaaacctactaaaacataatataaatagctaatctccaaatataaatcaaactttgcacatttaatacttctttcttcttattcgacgttaatctaatggtggagacgttggatccactcatagtacttctcgatatatttgttatatccaataagacgtttccaaagtcatacgtttagggtagtttgattaggagttaagaagtctggtgatcctactgaaaaaacaacaaacaaattaataaagataattaaaattactatataagattaactaatatatattgtaacaaaacaaaattttataacctgatgcgtttgatctttctctggccattcttagaacaacagacaaccttcgaataggtgttttgttaacaatttcagaattcttggttgctttatcattggtcttctctcgaagtgatgataatatccttttagtattggataaatttccagcaatagaaattattaatatcaaaacaaaaacatataaaaaatattatttttacatttaaaatttgtatgataatattacatattcaataatatataagttagtaacctgatttcctattttttgcggcatctcttggatgagttggacaaaatacttttgagctattggatccattgacttatatttcctcttgtgtttggtgtattataatttattctgtgtccttataaaacaataatatatgaatgaaaataaagtcgaaatacgtaatgatgaggatatatgagcatactacctgtaagaattgatttcatcgaattaatgggtgtaatgggtgaggaactcccattattattttccgaataaaagggtaaggacacgggagtatgaggagtctgacttctttttgtaaggtcgacatttgtaatgtcactaagcactttaccaaaaacataactgacggtaaccaaattttttgatccaattgtttgattttttagagaaaagttggtttcatggaacaacattttcatcattttgagatttgaagactttttgttgttgatcaacatcattttcatcattttcctttttttcttcattttgtaaacgacgaacataaacaaagaatataaatttggttttagtagaaagtcgaaatatttcagaaacagaaaatatgataaacataacaatgcaaataattaggaaacaatatgtattgaaataacacaaaatctataatataatactattatggcgtaacatacgaaatttataaactaatttagtttatattttattattgtgcaaatgttaacacaaattatggaatgcttgattaggaaactcctcgttgaaaccatggttgtttccaacttagaagattctcatacgttttaaaggcatctttcattggataaatattttaataaaatctaagttttgcagatttgtttccattttttaatccatgcatatctaacatatattttagttaaatttgaaatcaaaagttccagtttaaatacattgtgttacaatcatctaaatatctaaaaattttaaatcaaaattgtaaataagaataacaatctcaaaactttgaaatttttatctaaccttaaggaactatagtgatttagcaagcattaaatataacaaaacataattaaagttaatattttacaaaattcatgcataggaaatgaaatcaaaacataaacaaagtcttaacagtacaaattataagcataatatagtagatttataaagtaagatagaaagcattctggtctttatgtcttcaattctcatcaacaatttcatctagctcagctggttgcatccgttcaaggaattgagtcttgaaaaagtaggaaaacaaaaaaagaaataaatagtccagactaaaattttatataacacacttatcagtaaaggaacaatgaaaatataaacgttcttacgtgatgcgagtcatgttaatctctgggtaagtttgattgaatacaattcttgaagcaccattatgtgagattagacattgacgacctaaaataattatgtttttattatatgcattagctcgataaattaaagatacgatgagaagagtgttaatatttaccttcgtgatcagaaatcttccaaaatcgaaacacacaggttgtaggattcataccgaaggtccactcataatcaagatctagaccaagatccctccataaacccataaacaaatcacaagtatatccatttgcaacacatgtcagagatttttccctaataagaacatcaaaattattcctctcaatcatctaagttctataaattaagacacctataaagataacaatatttactatgttttaatataaacatatataaccatatagatgcggaactatatagtcggaaatattaaccaaatatttttaagctcaaactcgagaaattgagaaagtcaaggattttcgaaattttgaggaacataatcgggtcttgttatattttcaactctcacgacaacaccacaagcatatacacaaaaaaaatcgaaaacatgaaagctttacatttacaaataaatagaataaatatttttaaaaaaataaaaataagaaggttaccatgagcaattgtagaactaaccgtcttttgtcgatcatggagaaggaagcaaatcgaaaaaagttatttggaaccaatctacccacatgagatattttggtgttctaaaaaaacttgatcttgaacttattgtcggtaaagggaggagatccgacggatgctttgatgacatgaatgtattccataaaaaaccaacttccttcttcgagaactctagggatgttatgttcatagacgtaagaaggagcaatagcatcaatcattgtcccctaaaaaaaaggtttaaatcatgcaatattaatagattagattcaatgaatactctaagtttagacttacaatctcgtagcacaagatcatgcggtatgtcttccatccctcatgaggcagtgaaggcaaaaaacttagtatcttaagtcttaacaaacaccttccactctttgttttttggcgaaatttgagagaggtatgagattcatttgtagtaaccacctctatcatctctcgacatgtttttttttttttacggttaatgggttcaaagaaagatgaagaaggtgagtataatggatataaagaagagatgaggttaccttttttccgttaatgggttaggacatgtgtacgtatataattttaaatatttagtgtatataacttttaccaaaaagaattaaaaattattacaaaaattatatgccatacaaatcttgtcaatcgaatttggaatctcaataagaagttatagtgctttttatggttacttgcaaaaattaatgaattttgtaagaaacaaaatgtgacatatgttgtcatatctcttggatgagttgtcaaatctagttaacataaaagtttaacttaatgtgagtatctacttaatttggtatagaaggaacacatatgcatctagatttattggaataactcacaaaaatgtgtaatatttacattacattttttatcgtcatacaacacatcatttagtatactattatttgttttaatattacttatattattttaaaattgtagatatggcatcattccgtatatgccaattgcgatcacaaggtgtacataatctaaattatgaagagagaattgaattatgaaatttggaaaatgagcaaattgaacagttaataattcaaccgtcattgagttgctacaatcgaacttttgaaagaggaccaattcaaacagatggcgggatgggatggaaaaatacttggcgtcgaatacaagaagataaggctgcttatcttcaattactacgaatgtctctggattgttttagatcattatgtgacataatggaaacaagttatggattaattcctacaatgaatgttagtattgaagagagtgttgccatgtttttacggatatgtggacacaatgaagttcaaagagatgttgggttacgatttggacgaacgcaagaaacagtgaatcagaaattttttgaagtccttagagcgacatagatacttgcttgtgattatatcaaaacgccaacaacacaagaactacgtcgaattcctgaataactataaatggatcaacaatattggtcatattttagtggatttgttggaggtataaatggagttcatgtatgtgttaaggtgaagcattaactacaaggaatgtattggaatcgacacgatagaacatcgtttaatatcaaggccatatgtgatataaatatgttgtttacatatgtttggaatggagcacttggatcgtgccacgatacagtagttctaacgatggcacaagataatgattctgaatttcctttgcctcctagagataagtattatgtagttgattctgggtatccaaataaacaaggctttttggcatcttatcgatcttcgcggaacagagttttcggtatcacatgtcacagctctacaatggtcctcctcttagaaataaacatgagttgtttaatcgatgtcatgcatctttacgttctgttattgaaaggaaaattggagtttggaagaaaaaatggaggattctttatgaattttctagatatgatattgatgtccaaaaaacagtggtaacgactacaatgtgactacataactttatcagaatgtcgaattattttgacgagaattttgttgaagtaataggagatacaaatatcaacaacataaattctgagaatgatctagatgaccgaagagaagtggtatacctgatggaaatcatatggcaaaatataagagaaaatattgctgatatgttatgggcaaatcaaattattattattttatttattaatttaataatttaatctgcatatattgaactgcttttaccattcgaactcatatttaaactacttgatttgcatgatatgcatttgtcatgcatgatctacatattctgcaagatctacatgatctgcaacgcttgaactgcttttaccatttgaagcctaagtttaccctcacaaagattctctttacttcttgtcattaaatgaactgtttgtatcttcacgagattgtcgttatagaaagaaaacctcatccttccccattgttagggatgtcaaaatggctaacccaactcaactcaactcataatcaaatgagtttaatgttaaatgagttatgggttgacccatctcattttgttgggtcaacccataactcatttcatttgatgggttaagttgttacccatttaaataataatttaattaataattattataaaataataataaataattattatcatcattaattcattatcatcaatctttggatatttaccgattcacatttttttacggatttatatttttgacgaaaaaattatgggtttacgtttttattgcgggaagctcacgggtttacgtctttttgcaggaaactcccgggtttacgtttttggcggaaaaattacggctttacgtttttttggcgggaaaatcacggatttacgtttttggcggaaaaattacggatttacatttttggcagataaattacggatttacaatgatatcaacaaacaaagtaaagtaaacccacaaacaagtgattgcaaaaagtatagggatacaaagagaaacaacgagagagatacggtgcgaaagtgagaaaacgcgcaagagagagagaggggatttgaaacaaacctgctacactccgacgatagatccgacgagatctccggcgacgagatccgacgaagagaatcggcaacgacgagatcacactgacctcgacggtgacgaaggaatctatattttctcaattttgtgtcgaggagagtctgaggaacacatgtggttttctcaatattggtttagatgtgttggttaaacttaaatcaacattggtttagagattttaattggtttaattcaaattaccaaaacttgatgggttaattgtgtaaaccattaaaaccattaaccattacaaatcaactcattttattcatcaaaccaattgacccactaactcatttgattcatcaactcatttgagtcaaaattttcaacttattaaggttcataagtttagttgagttgagttgacgcaaaaatcttgacccattttgacatccctacccattgctttaataaagaaaagtactttcagttttattagtaaataatgattcttttatattagaaaattcattttctataacggatgaagagcaaattatataattatttatgttttataaaacaaatcattattaacacgaatcgaatctagaacttctaaacttttatgtttttggtagtttaacctctagactaattcgttagtataaaaatactcaaaaattagtacaggtttacttaaatagataatattgtgaaatttaattaaaaataataatttgttgttaaatgataagaagttataatatataaatatattatatatatatatgagtacatctctaatataagattctcagtttttaattttaataaaaaaaatattgctaactatacaaagtataagagaatatatggtcatacatacaaaatatactgttgtattctcagctacacaaagtatatgtattgcatagctacatatatgaactatactatgttatatggttaacaccagaaacatacaattttggtacaccgattggttgacttcggcgttaatatatgtgaatatgcaatacatctactttgtttaaccgaaaatacaatagtatagttggcatgtgtgaccatgtgtttttctatacttatttgttttcttttttagtatctatagttttatctcacctaatacacacttgtatatgtgtttattacgtaattatttaataaaattttatcataatttctttgtaatttgtagatgtttataaattaatttagcaggcaaatatgataaaataattgatgtatttcgtatttatgataatttcatttaaatataatatttgtgactatagtgttagatcattattatgtttttaagaatataaaatttaatcaaaaaaaaaaatgttttacattaaatgcttcataatataaaagatctgaaaccatttttgaatgtcctcatatagcattcatttgaatgtcagagactattttcttatagttaatatttgtatatatttttaaaattcaactttcacatggtccaaagcaatattttatgtaccatatgcgtttttatatatctgtcgttatatgtttgtcttctacgagttaggtcaagtagacatggtcgtttcattttcgtcaactttctacaaaacccactatcagcatcacactagattggccaactccaccaatgtaagatttaaatatatgttacaacatggatccactaaagtactcgaaaacgtcaaaaacattaggagcaaaagccaaaaagcaaatcaatgatttggttgacaataatctttctgacgcatgaagctttccttcttctcttttaagatttggattttgtatcaaacctatgatgcattatcttatcacttgtcaccaatcctttctttgattttacacctacccaatcatatacatgtatagatgtgcatgtgcaactttaataatgacgtgtgccgtatggtgattcagttgtattaagaaaatgagactaaccaagttgggttgtccgattattatgacattttttatgcttagaaagatttatatttaattattttattttttcatcgtccactttgatagtgtataacttcggttccacatccactatactatagaatgtaaatatgatgccaaatacaaaattattgagcaattatatatatatatatatatatatattctaatatccggtttgtaattttgtttttagagttttcaaaaaattagttttttaggcaaaacattttttatagttacttgaaagagacattttctatgattttttatattccctaacaaactatgaattcaccaaccacacatagatgttattttgtatgtgtgttatgttttaaccggacatatgcagaaattatataaaagagatattaatgtacaaataagctatatatgtttattgtcttcctctgatccaactgagaaactctaatttggaagttcaagtaaatctttaacaacagtatgcccactcacgagcaaacaacaagtgaataacgattatgtatttgttaaactttttataatatacaagtatgatgttaaaaaatagataaatgtgtgaagggcccattgaaatgtgttatataatttagtttagtcgaagccacgcctattatcgtaatcattataatttgacttccgtgctatgtgacaaatgacaaattcctaagccactacaaactgatttttgagttattttcgttataatgatatagaattctgcccaaattgtttcttatatttttaacttttagaggtaaaacataggtatgaaatgtatttgtatgggcttcatacccggaaatgataaaagtccaggccacgaaggggagatggagtgtacaatttggtattctttttatttacctataattttattcttagcattgctatatatatctacatagaaatattaaccgaaatcgaattgtaaacgtaacttcacattcatcatccatccctaataccaacccatccgataataattccacaagagttattcagattttctattttcagtatatttaaataaataataattgggatgtgtttttaatcaaatggttaagtccacttaattctgctatcttttcaccggagcttgatttcaccaaatcgtgttaccccatgtaatagggattgaccttagatttatcgattcaaatatgtcaaatttgtcttttaaaataatcatataatatataaaaatgaattttgaatcaacaaaacctctcaattatctgcaatctattttcatcacttagttaaattattaacagaaacgcttcaagtaaggaatttgatttaaaactcctcaagtatcgagtattccattataaactcatcaatttaattattaataaaaaatacatcaagtatataggcatggccacggttacggtttattaaccaccggttacggttacaaattttctttaaccttaaccttaacctctgaatacacggttaaaacggttacggttaaaacggttacgattaaaacggttacggttaaaacggttacggttaaaacggttatggttaaatacggttacagttaaatacggttatggttaaatatagttacggttatttgataattataatacaattaatatatgaagcaaaatcgaatattttcttaaataattttctttttaaaagaataattatataaactagttttttacagtaaataaataaacgatgaaatgattaaagtactatttaagtgaaataattatgtaattaggaaaatgaagtaaccaaaaaattcatatttattaattataacaatgtttattaagctaactaaaacaaataataaaaaataaactttaataattctcgttgatgatacatcactatcaatatcttctaattcttcttcattctctcgaaggaatttttgatgtctatatccggctctggtccaatcgtcaagacatgcttgagcttcaagagaatctggactcattcttgatcgagtttcatctagtatttgacctcccatgttaaaagctcgctcgatggaaactgtagaaacgggtgaagaaagaacgtcttttgcgatcatggctaaaattgaatattgagattggtgactcttccaccaatgaatgatttgaaagttatttcctgcatctgcatcactaaactcaaaattagtatataaatatttttcaagttcagcaattattaccttgtgatggtcattgccttttacgtcgtcgcattctttctggaagacttaacgtagaagttgatgacatatcatttgtagagatgattaagttccttgtggtaccaaatgcatatataatctataatatttatcatacaaattttctgtgtcttttcttgagttggaaataatgcttgaaacattaattaatactatcaaacaaatgtaatagatcataatatgtgacgagataatcatataaaccatcaaatttagttcgaggatcaaaaagagatgcaagcaaattaaaaggtgggatttctctatagtattttaaccatttatctctcatactagttatgcatgatgacaaaacaatattattttcatgttcgtgcatcagatcagcaatattaacacattcataaaaaaagtaaatgactagtaggataataaacaccgaataataaaagcattgcatcattaaaacattttaataactttaaaagtgcattacaatcatcccaatgagtgggccataaagttaaagaactgctattttgttgaataaaactatacaataaatctttataaccaatagaatcaacaagcatatcatatgttgaattccaacgagtaggaacatctcgagaaaaccttttggggatacattatgcaatttacaaaatcgaaaccattttttcattaattgtggatgaccccataaataattcaaagtagttttaattggagaaataagattattttgagaaacaaataaaccatcttgaacacataaatttaagacatgacaaatgcatcgaacatgaaaatattttcctcctaaaataggactacaattatttattaattcatcaatggaagaagtattcacggatgcattatcaaaagaaatagaaaatattttgtttgttaaattatattcttctaaaattatttttattaatttaaaaatattattggatgtatgtctttcataaaaaactcgaaaagcaataattctcttttgaataatctaatcactatcaagccaatgagaagtaatacccatataatgatgaatttgccactgatccctccaaatatcagagcatattgaaacattattagctaaaccagaaaacaaacattctaaatcttttttttgtttttcgataaagtgattttaatgtacgagtaagagtagttcgaggaactctcttagcttgaggatttaatgctttttggcaataattattaaaacccagtttctcaccaaagctaaatgaaaggtgattaacaacaacacattttactaattcttctcgatttcttttatcagaataatgaaaattcgaaagattagcagaagtagcattttgagtttctccaccatatttgtcaggatgatttttaaccaaatgatatctatatgatccatatcctgaacccgatttccaaaaaaaactttgtgaataagtgacccaaatgcatattatccttaagtataggaaagcctctgttcaagaaagaaggtgttcggttttgggttagtcaaagcttaacacgtgtgaacgactaaagctgagaatcagctttataatccaagtctctgtgtttcttctgttgtagttggttttataacaaagagagagagagagagagagagagagagagagagagagagagagagagagagagagagagagagagagagagagagagagagagagagagagagagagagagagagagagagagagagaagagagaagagagagattcttgtaaccgagcaacaatgtttgtgacttagtgaattccggcgagacgtagggttccgatttggagactgaactcgtaaaagtcttgtgtcttctttctttcttgcaatcaaacaagagtcaagagtggacggtgagtttgagcgatctgcgattcaagtcataatcgtacaaattggtatcagagctccaggttctcgtggtagctgatcgttgttacaaggatgacgaattcgttgatcaagatgtcggtgttcgacggaagtggtgacttctcactttggaagacacgcatgttctctcatcttcgaatcctaggcttgcaggatactctggtggaacaagctctgttcccaccactgaaagaggaagatgaatcagatccggagaagaaggagaaacatatcaaagaagaaactgggagaattgaacgatgtgagaaagctatggtcattatatttcttaatgtcggtgataagatactgagaaagattgatcattgcaagactacagcagaagcatggatgttgctagaacgattatatctggtaaagactttatcaaattgtgtgtatcttcaactcaaggtttacaactataggatgcaggaatcgaagacactagatgagaacattgatgagttcttgaagatgatatcagacctaagtaatttgcagatccaagtccccgatgaggtacacacgatcttgattctgagttctcttccagccaaatatggaagagaaggactacaacttgaagaggtaataagcgcagcaaaatctaagaaattagagtttcaggcagaatccagttctaagtctacagcaaaaggccattacgttaaaggaaatcagaacaacaattcaaaataaagatctcaagatggtaagaagatatgttggatctgtgggaaagaaggtcatttcaagaggcaatgttataagttgctagagaagaataagtcaggtgaatttggactggcaaaagatgatgctcatgacttggttggtttagtagcatcagaggtaaacctgagtgagaatcagcttgaccagcatgaatggattatggacaccggttgttcttttcatatgacaccaagaagagatatattcattgagattgaggagctgacttcaggaaaagttagaatggcgaataactcagtttcagaggtaaaaggaattggtaaagtgagattcatcaacacagatgggactacatttgtgttacatgatgtaagatacatgcctgaaatgtcttgaaacatgtctccatttcaatggatactttagaagcaaaagggtgtgtgtttaaaggaaatgatggtgtactcgaagtaatgcagggaaatacaatgtttatgaaaggtttgcgaagagcttctctatacatcctgcaaggagaagctaagaagtcagaagccatggtggctgagtcaggagattcggatatggatctaacgcaggtatggcatagcaggctcggtcatgtagaactgaagggaataaatgaattagccaagaaaggatgttttggcaaagataaagtctcaagtcttaaattctgtgaagactgtgttttcggaaaaacacataaagtgagctttgggcaagctcaacatgtcactaaggagaagttagactatgtgcactcagatttatggggatcacccaatgtgcctttgagtcttggtaagtttcagtactttcttacctcaacagatgactggtctaggaaagtttggatatacttcctcaaaaccaaagacgaagcattcgatgcctttgtactgtggaaaaagatggtagaggtttagagtgaaagaaaggtgaagaggctacgcactgacaacggtctagagttttgaaatcataagtttaatgatttttgcaaacaagagggaatggtgagacacaggacgtgtacctatacaccacagcaaaatggaattgctgagagacttaacagaactatcatgaacaaggtgagaagtatgctgagcgagagtggtctcggtcaaaggttatgggctgaagcagcttcaacatcagtgtatctgatcaacagaacaccttcatcagcgattgacttccaaattccagaagaaagatggacttcagccacactagacttgtcaggactcagaaggttaagatgtttagtgttcattcattctgatgaaggaaaattgaaccctagagcgaaaagaggtatcttcacaggttatcttgaaggtgtgaaaggattcagagtgtggcttctagaagaccagagatgcacgattagcaggaatgttgtcttcagagagagagagtgatgtataaagacatcataactcaagaaaaatcacgtatgtcctctaacttgtttgatttatctactgatgagtttgtttgtgaaagtgcaggaacagatagaacaaaaagggacttatctcaaggcggagctattgatcaaggtggagaaaacacacctgaacagaatacaaatgagacaacaacagaggcaagaatagggactccaattaatcgttagatagcaatacacagagcaaaaagacagattgtcagacctgccaaactagaagactatattacagatgaggctgaactagaagaagttgctggatatgcttatgtggtcattgaggacgggggaaagtaagaaccaggaagttttcaggaagctttagaagatgctgatcaagataagtggattaaagcatctgatgaggagatggaatctctcatgaaaaacaaaacctggatattggtggacatgaataaagaacagaaacctattggttgtaaggtgttcaagaggaaagctggaatagtaggagttgagagtcccaggtttaaggcaaggcttgtagccaaaggttattctcagaaagaagggatagattaccaagaaatcttttccccagtagtgaaacatgtctccattagtttttttctaagtatggtaacccattttgacatggagcttcagcagatggatgtaaaaaggcattttttcatggttttttggatgaaacaatatacatggagcaacctgagggctatgttgatgagaagaatccagaaaaggtgtgtctgctacaaagatctctgtacggcttgaagcagtcaccaaggcaatggaacaccaggttcaaagagttcatagaggctcatgattataagcggagctcatatgaccgttgtgtgtattttaagaagtctgtaggtggtgattatgtgttcctattactatacgtagacgacatcctgatagcctcaaagaacatgaagcaggtaagtgatctcaaagagttgctgggatctgaatttgaaatgaaggatctcggtgaggcaaagaaaattttaggtatggagataaacagagacaggcttaaaggtactctttctatctcccaggagggttatctactgaagctattgggaacattcaacatggatcagtcttagcctgttttaacgccaatgggaatacatttcaaattgaggtctgctacagatgaagaagttaaaattcagtacgaggcaatgagaacagttccatgtcagagtgtagtgggaagtctaatgtatgctatgataggcacaaggcctgatctagcacattttgttggtcttgtctgcaggtttatgagtaaacctcttaaagaacattggcaggcagtcaagtgggttctcagatatattcagggtttgttgaagagaaagttgtgttacagtaacaagggagatttcataattcaaggctattgtgactcagatcatggtgaagagcaagacgggagaagatcaacttcaggagttatattcactgttggtggtaacgtggttagttgagtatatggcgttgacatcaacagaagttgagtatatggcgttgacagacgcatcaaaggaagcagtttggttactaggactcatgaatgaactcggttttgagcaagaaacagtagacatttataatgactcgcagagtgccatcacattagctaaaaatgcagttcatcatgacaagactaagcatatagagatcaagttccatttcattagggagttgatctacagtggtttgataagagtgaagaagattgctacagaaaccaatcctgcagacatattcacaaaagttgtaccagtggggaaacttcaggaggctctggagtttctcagagttacagagaactaagaagaggggttaagccccaagacatgaagctgagtgggtttactgaggagatatgaagctgagtgggattactcaagagataagaagttgagtgagtttactcaagtggtaaaagctggttgggtttagccaggtccggaggtggagtccagaaagctaagtcatggcattagggtcaaggtagagaattgtgaataagtgacccaaatgcatattatccttacgtataggaaagcttctgttcaagaaagaaggttttcggttttgggttagtcaaagcttaacacgtgagaacacaagtgtgaaagacgaaagctgagaatcagctttataatccaagtctctgtttttttctgttgtagttcgttttgtaacagaaagagagagagagagagagagagagagagagagagaagagagagattcttgtaaccgaggaacaatctttgtgacttagtggattccggagagagcctccggcgagacgtagggttccgatttggagcctgaactcgtaaaagtcttgtgtcttctttctttcttgcaatcaaacgagagtcaagagtgaacaacgagttttagcgatatgcgattcaagtcgtaatcgtacaaacttttattgcagtaattacaacaagctttcatattttcatcaattttttcttttcgaaagtgtaccttgaaaatatcgaaagcattcggacgttgctttcctgagcttgtgttagcttgttcttcattgcactttcttgagtattgatggctggtgttgagttatgaacatcttttatggatgtgccgatgttagatcgaaatgaatcggaagacatttttaaacaaaaataataaagctcaaaaatatgatgaaaaaaaaatctttttaacgttggatgaagcaagaagaataatatttatagaaaaactggttactatatttatggaaaaaatctttaaaattttttaaattaaacaaacattgatgacttggtcataaacagctacgttccaaaactgggtcaagctcaagtctttaacgatctaattctgcagttttgccacgtaggattggacttggtcataaattttaaagattgaaatgaactaacggattgccacataaaattttaaagattgaaattttattttatttcaatccggcaacattcaagtgctcgtgcgttttgccacataaattttattttattttatcttcatttgatgacatcacacacttagctctctcgttttctcttcctaatcacatttcatctctagtcaatcaattatcagttttgaaaaaactttactacttctttgggttatgagaattgaggattttttaaaatcatttatcattgttaattatgcaaaactaatgaccagctttttaataataatgcaacttggtcagctttccgtaaaaaccgtatggttaaccgtgcggttaaccatacaattttgatacggttacggttaattaacgattacggttaatatatatttttaaccgtaaataatatatttttacggttacggttattaaccgatttatacggttacggtttaaaaacggtctggttacggttagattttggtcattcctacaagtatagatatgtatgttaacgaaggaatccatgtatccagagttctacatttgaatctatagaaatggtgagagtggcgaataagtagaaatgctaaattataattgaaataatttttactttttttttactatcctactatattatttaggaagtacattttaaatgtaaccttaatttttgtagttaattacatgacaattccattacaaaaatataatcaaaaacaatttttttaatgacgtcattaaagttaccaaaatcatttaataacaatattcattcttaattatagggcttagtggatctaaagacgggtcatcaaagatttcctatactgaagcaaaatataccgaatattcaaatatctatctgttaccaaattataaacaaataagttcgtaaaacaatttaatattttttatatgaaatcagttaaatcttaatcacataaaaattagcacaaaaaaaagtattcaacaattaaagttatcaaatctctgtgttatataagttttgatactatattctaataaagtgtaatataccttttcaatttgtattctttaactaatttaagctaactaatatatttgctaatcttatacctatcaaaaccgactatcgtttcttatctctatagcatttttgcaaggctttttttggtggatttgggtaaaagtgcattcgggtcatatggtacattcccttaagagtacattagctaaaatgtttagattataattcagagtcatatcataaataaaattaatattaataaaataaatgactttttggcaagacggatttggtgggacggatttttgaatcaacattaataaaaaaagtaaaataaaattaatccaccgtttcaatacgggttaaatcttgattttttttttaagactactaatattaaacatatcaaatcatcctaatttagaaaaggttatataaaaccaaaaatgttatgtggtatgtataatgttactatatataaaattaaactataaaatagaaatgtattagagaatgatacaatttgcaaaacttttatatataatagataattcttaaatttaaaaatttactacttaaaaaaataatcacgggacgggtaaaaaaattacagaacgggttttattttggaattgggttataaacttcagatttttaacaattgtctcatggattcgtggtatagcgttacttaacaacaattataaactgtaaaatatatatattttataaaaatcaaatttgcaagtttaaatatatatttcctttaaaaaataaatcgtcccgcggtataccgcgggttaaaatctagtctatactattaattgggaatcattgaaaataaacaaccttatgaagggtaaaatattacatagaatgccattgattgttattgtttttaaataaattcattaaggatagaatagtaatcacaaaattaatagatttaaatataaaaaatggtaatattcttttaagcaattattagtttcccaaaattaaactcactttctctttcctattaattatggacgaaaaattaaaatttatttcttaaaatttgttaactaataaaatttgaaaaactaagatttgatatcaaattatactatattattaaactaacattttggaagttagtttttattttaaaatttttaaaatcataacacttgcttgataccatgaataaaaaatcataatttgtgatagataaataaattcaattttagaattttaggttaagtattttgaaatataaaacgaaaatttatttcaaaatttctaaaaacaagattagatgttacaaagatttatatttactataaattaaacaaaaataattaattgaaagtaattatcattatgccttacatttagaaatatctaaacaataaattgtacgtactaatttcgaaatattttgggttttactttttctttttttcaaccggatctttttttaaataaatccataatatattattgaacaaacttttgaaataatgtaaactaattatacatttttcattcaaaacatattatccagcaaaaataaattgcttttataggtgtatttcaaaattttaattatattccaaaaatccaattaattatgattaaacaagggaaagaagaatattgaaaatgtagctaaggaaataaacattattacatttgttaaaatataattttttataaaattatttgttataatgctattcatattttttgaatttgaagaaggaaaaaaaatcaagaaaagatatttgtgtgttttaatttatgatatatttgtaaactttaacagcctcttgttaatccgcaaaactcagtcatatatattgtacatctatactattaattgggaagcattttatgaactacatgagggtagtttaaaattaactaaataaatttttacatgggtaatttagtaaattaactactactaaataaatttagttttcataaaaatcaggctattgatttcgaaattgtatatatagaaacttatttaactttgataatatattttgagatatttccggaaacaaaaaaatcaatttaatatcatcatatattttagattttaatatacttccttaagaaactacactaataattttaaaaacatttaaaaagataccttcaaggattcaatctcttattgtgcacatgataaatccgtgaattaataaaaattccttaattttagtgttaacatattaaaaataaattaactgataagatattataatatttttttcttatcaatacctaacaaaccaataatatttaaaacgaatatatatattattattcattactttataagataattagatcaaataaaaatagtactcaatggtcatgatcttcatgtttaaaataatagattgctagatgaaattggaaaaaacgaattcattgctttatataattaaagaatccttaatatgtaaacctaaaaaatgcacatatatatatatatagcaaaatcaacactatttgtaatatatgtcaaagaatataaaattatttatggtaactcaaaaagtttttccttttttgcagtatcagttttttgtatcttactttattttaatgatatgccattgatgttttttttatccttaattttgaaaatcgtaaattgcttattaacatttttaatagaaaagaaaatttgtaattgattaataaactcgatttcgtagtctttttggttttagatgagcaaacttttacgagtataacttttagaaaaatctaaataaaactttatcactcttctatacgtcactataaaactatttttctctacttctttcgcaaactaaaagatgaaccatatctctatatttacttttgtactcttcttaattcatgtctctctatgttcatataatttgttagtttctacgttttttaaaatctattggaaaccttttcattgaaatcactcttttgtagattatgttcatgttacacttttgcagatttcttgaaataagttttttttaattctttttggttccatatgtgatcattttacatgttattcttttctcatgaattaatacctttttttttgttttcctacaaaataattgaagacgcttccatggtattcactcaaatttcggatattgcgaaagccatttaagcgatcacttgtcgaagatgtttttgttctttacgagcaccaatttaactgtgttgtatgttttttattattagattatagatattgtgcggttcacaacattagatattgtgtcataaataatattttatacttttatatgtacattatcatttatacactacaatatatatcacaaaataacaaagtaatctatatttgataaaaatttattacaatatttcttaaaaaatagaaaactgtgcacgtacgtccgggtcatgataaagacagaagatacaaactgggtttacattaacatgtattttggcccacattaaaaaaattggcttaaattatgggccactaaaataaattttgtcagagaggttttttgagttaccaaattttaatttataaactaattttgcatagaaattttacactatttaaaatcttattctcacaaatatacatttctattataagtttataactattagacttctgaaactgttaaaattatttgttatgcaggaaaaccaaactatttatataaataaaatactaataaatgatgcaaaaattgttaaatccttaaataactaaaatttctattcaaattttaaaactaataaaacagaaaataaacgtgtgtaccaaaataattttaaggacaaaagaaaaatccaaagaaatgttactattatgatatcttaactaaccacaaaaaagaaaacaaaatcttaactaaaactttttgcaaacttttttcatactttccacacatcttattttcaaatattatgagaactgataaatttatgatatatatactattatataattcactaacacaaaaaaatattagtacaaacttttatcaaagcaatatgataatacttacaacctgcataatgtgcggttcacaaaattagctattgtgtaataaataacactatacacttttctgtgtacattataatttatatactataatatctttcactaaaaatttattttaaaacatttattaaaatacgaaatcctgcacgtatgttcgggtcagaatctagtatttaactaaaaacggattactttcattcgatttggaaccaaatctttgtaccaaagcataaacaaaattcattgttttcatgtgctcaatgcattcagtttcaacctcttattagcctaaaacttttctctaaattttaaacatcattacaacaatacctttcataacatataacaccacatagggacatataagtgtgtttgacttttgatttattaataaagcctcaggcaaattaataaacaaaacaaaagtctccatattcctttttttattattttctttgcctatcatattacacaactcaaaacaaaacaatacaccaaatcaccatttcctttacttcacataagaaaacaaacaaaagaaagtaaactctttgctcagttacgaaattaccttatcgtcctttagggtttacaatctgagaaaatattccactgttttcttcagatgacaagtcatcacccaagtcactttctccggcgctgatgttcaccgtcacacctcctcctcctccacctaaatccacagaaccaccaccattgctcggcgttcggtgacgtgatccatcagcagtttcttgtaactgaagtgcaaattcaagattccacaagacatctcccatcgttggtcgatctaagccactatcagataaacacttctccgccgtatccgcaaatttcttcaaacactctggattaatctttcctttaagattaggatcaatgatgtcttctaatgtccctttacgtttacagttcatagcccaatctccaagactaacttgttctttagataaactagggtttaacgctggcctagcgcataaaacctcgaatagaacaactccaaatgagtacacatctgacttctcagttaactgttgtcttctgaaatactctggatccaagtaaccgaaacttcctttcacaacggttgtgacatgaccaccattcatgtttggtccggttttggacaatccgaaatctgagactttagcaacccaattctcatctagtaagatgttagttgttttgacgtcacggtgaatgatagtgtactttgctcctgtgtgtaggtaatgtaatcctcttgcagctccaatggcgatttcgagtcttcgtttccaagttaactgaggtctctttgtgttgtaaagatgttctctgagtgttccaagagacatgtaatcgtatattagacacatttctccaccttcatcgcagtatccaattaatgagactaagtgtttgtgtcttaatcttgagagaagttcgatttctgtctcgaattcgttgagcccttgttctgaattagggtttgatttcttgattgccacttttgtgcctccatctataactcctttgtaaaccttaccaaaccctcctactccgattacgtttgactcatcgaagttatgagttccgtgttttatttcggacaatgagaatcttcgacataaacccgctgcaagattcgataggtggcttccgttgttgctcttacccgatatagtagattttgttgcagatgtgtgtgagtttccatatataggaagccagcttgatgtgtgagaatcgctgcccgaaaactttctttttctctggtacattgtgaaacacaatgcacaaaataaaacagctgctactcctccagcagaaccaatgacaaaagctgtgattcttttgtcaccttgaaagtcctttttaacatcttcattagcttgcataggtgatggcttagggtttggaccggcaaggttcttcattgtgtcaatcttgaaaatctctagcccattaagctgtgaatcgtaatattccggttgaccaaatgtcgaaggcgtcatttgaagcgatatctcttcccctcctcctccggtattagcatcaacatatatcgcgtaatctttgtaagtagggatacctttcccacctgtccacccgagtatatctgcggggtttgtatccccttgcgcggttctgttgttgatgaaaatgttgaatactttctggttgattttagcaagctggaattcacagaagtggagcctcatgatataggtgaaattagtgtcaacttgaaacatccatgtgagatttgacttcatgttgatatctccgtttggtccttgtgatcgagctgttttgtaaacatccgctggagcggtagaaaccggcattttctgataatcaattctaaaattgttgcttgcttgtaaagtaacaccaagacctgcgctgaatatataaggcgcgtcattgtaccaagttcttgttaatccaccagagtcttgacttccgggaatatcctgcccaccgacattgagcctaaacatcgtttgaagattcgcggtcttagtatctgaagtctggtctgagaatccaacaagagaagctgtatcaaacaattctggcatcggaatgacctcaataccattaatgaaagcaaacgcttttggatgtttatccgagggagtaaatatgatgctcaaaacatctttttcggatggtgcaagagaatattctctcacgaggtaagcttgagtcaaggcttgacatgtgatagctgcactaaaattgctgagaagggtaagatcattagcagccacggagaaataagagtcgagaatgttgagtcctgtgtatgttgatggatagaaatgtaagcggagcatatgtcttttgtcgcctttaaccgggatctcatacgttgctggagctgtaaagattcttgatgtcatgtaaggaaccgttgaaagaagtgaaggatcttgataagtagctggtgcatgaaccgtgtttggtgttttcaagaatttggtatcgggttcccattttttcttgtcttgatcaacagctggttctgatgctccgcagctcaaggagatgtcttggccattagattgagatggagaaactagaagaacatagaagaaacagaggaaggagaacagaatccggagtttctcgttcatggctgaaagatatgaaacatgtttttaatttcttaggcatacatgaaaacaattgataacaaaaaaaagagaagcttagttttctatgtagacattacctcaagcaccaatagagaaaactggaggcttgtttctgcaacctaacgatgtttgatcaaagccatggaaacagaagcagaaaccccccaacaagacaaaaactgcttgttttttgtggttgtgtcggaaagagaaacaaaaagtagttggagaatctatggaggagaggattagccgaagaaagctatgtttagtaatttgttaaaagagattactatatacttttgagattttaactcgcattatgacttaatactttttcatttttcgtttaaattcaaatatagaaacttttaaactatgttgtgtcaaatatcttgtaaagttctacatttgacttgatccttaaaataggaaaatcaacaagattttgatagtagaattccgaaattaactagattggtcaatctatattcttctagagtatgataaatctgaaactcgttttctttagggggtcaagaatctaaactaagaaaggtccctaattatatcggatgagtctttgtgtcaaatttaaacaatggaggaaaatagctcgaccatccattgcttaaatcaatggtgaaagctacttttaccaatcctccattaaagcatcttaagtctctttttgtgagagtttatgtggtcgggtcggcaaaattttcaggtaaaaagggtatacagaagattttctgatcaacccgacccgtagaagcttctttgttggccgcgtaaattggtgtcgcacgcggccatcagatgaagaacatacatttagaccctgaagcaaagccaaagctttgatattctcataaagaatagaggtcaagaaaatcatcaacgaaaagccctaatttgcactacacggtatttcccaactattgtcttaaaacctctgccttgcattacaagccacctcttcaaagtgatacaaaatggtgaggagaagagaaggtcttaccttaccaatctcgtcttcgacgccatctcttcccgagtcactacctgatattaaaacagtggctcctcataaaccaaaacaacggttatctaagcagttatcaatgcgtgagacacctcgagatgttgcttgggaaaaaaggcgccgtcagatgttaaagattcaggagaagaaacaaaaaagcgtctctgaaaacgataacgattcgccggatctaactgatgaagatttaagggagcttaaagggtcgatcgagttagggtttggtttcagtgaagaagccggacagaagttgtgcaacacgttaccagcattggacctttactttgctgtgaataggcagctttcgcctctcccttcacctagtagcagcaatggaggagatggatccttgtcttctacttctgtttcctcaagcagcataccttgtagtccaaaaaccgactcggattcattaaagatcttatgtccaggtacgtaaaacacaagttccaagtttatcttcttgtattgctgatttgaattcgtatgatcgaccaacccttgtgaatgtgagttgtgcaggggacaatcctcaacaagtgaagcaaagattacgacattgggcacaagccgttgcatgttctttgatgcaatctcactgatgagtgtatatgttgtgactttaagtttcaacttgaaacacttattcttttactttcgtgggtgaaataggacagagaaagaatcctacttcgtaggatctctctgaacaaagaaaaagatagagaatttttgggagaaagaaaatagagagagtgtaagagattacgtaccgtactctctacatacttgtgcaaagggaacaagatgaaaagatgtagccctttcttgttctgtactgcttattaacatttaatatatggtcgtggatttgatgattattttgaggtatgtttcccatatttataaccttccaagagtcatgccatgcacggttttgtgattcgacttcataattattttgacaatattttacttgtgtataatatttcaaattaaatgccaataggaaagaaaatagtaacaaaaggtgtttttatttttcatattgcttttaaaaccaaaacttaaaagttatatatagtgtttagaaacaacgaagcagaaaactctcacaatatccatctattttcatcatacgaatagtatggagttatcacattcacggatggatcttccccaacttcacaattgctctaaaaaagtacacaattcaagagaaattgatctccctttcaattagctgaaagatgtgcttagaccaactccaatgggacttttcatcccaccaaatatattataaaacttgctctaaccgaactgtatatttgacgttgtggtgttacaccagatttgatgtaatacagttcacaaaacaaaaaaatatattagtatacctcgaattttgccgatttcaggtataatctaagtataatgtttagattctttttataatttctacagtttgttttagtctttttcaggttttttatacttttggatgcatttggaaattataaagcatttgggagcaaaattgaagaaatcaagctaaaaaacgaatgtgcagtctaaaaaaggcatcagtgttgatcaacaccattcatggcctagtaagaagtctgacagtttaaagatttgaagtttccaaaatttgccccagaagatttccctttttgtactattagtccctgcacgtttttgagacattatatatagatttttaaggttattgtttagacttaaccttttacatatccattctaagttttatcttttcctctagaattccttgagattttggaaagtacttcatcagagatttcaaaaccctgtagagagaagattttttctaaactgtattcttcttttgatttctttatgcaatcttattcaaacatgttttctgtttctatggtcatgtctgaataatctccttgttgggaataaggtttttcattagggattcaaatgatttagtagatcgataacctgttaggaatatctttagagttcttcatcttaattgttcttaatgctagttttacagtagctaactagaacttgatcataggtgataggtaagatctcagaggctgcttattacctgaactatcatagatgacattaagtattgagatacgaatatatcttgttcaaatgcttaggtgaacttatcaaacctgtttataatgcatgttttagtatttaaggatttacaaatgagagtcgagattcctatttcttaagcaataggaaaacagacaagagttgattgattttagggtagtgatttgagttctagaacagttcgctaaaaatcatgattaactgctagatctattattcatctatttcttgagaacttccctaaaccaagctctttgatcatctaaatttactacaaatcaaatttggtatctgctttcttgtttcttttaacttttataagtatttgatttagcttaattttgagattataactgtctgtgttaacaaaataattttgtggaaatcgactccaaagtagtacaattgataaggttcaaattaccctaaaaactactctctcaaataagagatcaattgcagtatttaaggatcgatttccacaaagttcttttttttcacacaatgaattaaatgtcgagattaagctagcagggaatgactgaaaataaaagagaacaaagtaaaaagacagcagattgattggttgtaaacgatgaaagaaagagctaggaatagagaattctcaggaaactattggttagtagatctaatgaaagctaggttgttatcgaaccattctcaaactcaaactctaattatggaataaccgggtgcgttccacgaaactccctatgcctatagctaagaataaccggagaagccgagaaatctttaacctaaacatgcattctaaacgagttcaattgttcatcttagtagacaggccgattcttattacatacctataaaccaggctcatcaaataatagatccaactacagatacctatggtgggcatttctattatttggattcaagatctagttaattacttcagatctagcattatgtataatcaaagatgaagaattctacagataacctaacagggggtgatatactaaaccatatgaatccctattgagaaaccctgttcctaacaagcaaactactcaaacatattgaatgaaacaaacaacataattgagtaagaaagcatatatacagtaaataagattagagtaagaagggatctcttcactgtattaagaactgaaggaatctctgaagaacaatggatgaatagcttatgtctctgaaaataggaattgcaaagaacttgataaaagacacttaggtctaaacaatgacctctaaaactatataaaaaccctataaacgcctagggactaataatgcaaatagggaagttttctggggcaaatttcctcttatgtaaaattgaaagcgtcatggactttgctgggccgaaactagtgtcgattgacactctcgctgaatctagaactgaaatcgttcttagcttccttttccttagtttttgctccaaaatgtctccttatctccattgttgtcccattgcatagaatacctgaaaagacactaaaaagactcgagaaataacataaagactcaaaatcctaaccctaaatcaaagataaaatcagtaaaaatagggatatatcaactcccctatacttagcttttgcttgccttcaagcaaaacacaaaagccgaacccgtggaagaggttttgaaaacaaaggaactcccaacattctctaacatattgccatgatcatccaaactaagtccatatgcctaacaagtctaatcaaatcctaaccaacatgtactactctgcaagcttacacaacattctagattccatacctaagctccataactaaatccaccaggctttcatcgttaggtctcatcaaacaagctaacattcaagatccttctagacttattcttgtactataccatgataaatcgatcattctttttttttttttttttgttggtgttctttctctcccctaaacttattctttttgaagagtaaacaaaggggaactcgcatacttgatcgacaccctcggcatttttccaacctttgtaattgatcattcaaaataatgtataataatgggtcataggaaacattcctacccctatacactatttgaaaatcctgtcaatctctcattttctttttctttttataaggggagaggaacacattttctttatcacatgggtctcaatatcaggtatgaacaaggtgtcaagatctatgaatactaaccgtttgaagaggtaaaaggaagagcagtgagattagctctagccttagtggttgtgttggaaactaggatatcctaaggtctcttggtttgccatctagattttccaatagtcagattgagtcgaacctgcagcactcatcaaccatgcaataatcaagagaaatatagatcatgattcctaactaaactaaagaaaacattttttttttttttttttttgagaagggaaaatgactcaataaacttaaaaacgaaaaataataagaataaaaaaataaaagcaatattagtaagaacctcccctagacttaaacgaaactgtcccaagtggcattctaatctgaagacggcgggaaaaataaatcaaaaataaagaaaataaaggaaagggaatgaaaaatcaaaccagtgggttgcctcccactaagcgcttgttttgagtcaatagcttgacttgacggagttcaggatgtggatgtagtggtggaagattgttgctgcctcctcgccttccaaggcggtgtgtaaactgatccggtctgggcagctgcaggtgtcaatcgacactctcctagtttccttcaagaacaacaggagaaaaaagctttcgaagaactctagccttgttatcttgtgaagcagactttgaagaatctaaaaaattaattgaaggtaaaacatgagaagagatagaatagaacttatcacagagggcctcaagaggtgtgggctgaagaaattgtgcagaatcttatgtttgtgaatcccgagggtgtcgatcgacaggagttgtggtgtcgatcgacaccgttgctctacaactctaattggcgagctgagctgatgggagcgttgtgtgtggctctatctggggattctaagcagtttgaggaggtgtgtgtgtgctagaggcaattctactgatagtcttagtgaactctgaaccatccatgccaaactccatctccaaatcacacactttgagagagatcctacatctcttcacatcaatcctagtaccagctgtagctaggaatgctcttccaaggataagaggatccttgggttccttatcgtagtccagaaccacaaagtcaacagggattaaggagttaccaaccttaataggaacatcctcaagaattccttcagggattcgtttggaacgatccttgaaggggagagtgattctagtcggcctgtagttagtcatgcctagtctctcagcaacagacttaggcatgaggttgatacttgatcccagatcacacaaagagcagctgaacctgcttgtggagatagagcaatcaagaacaaagctacctggatctggaagcttcttagtggtttaatctggagtgattgtatggttgtactcagcaatgtccactctctgtgccttctctttcttgacctaagacagcatgattgcactgatgtcccttgtcagcaagttagcttcatctgagctaattccattatcaacaagtcgcttgacatacttgttgagtggagcagaagatgtcttagaaacatccttaggaagagaagtgaggatcttttccattatggcggtgcacttagcagcataaatctcctgattagaacgacgtttcctcggataaggaacaggaggggcataggtagactcgggctgcatcgcaattctcacctcatatggtgcagtccggacccagtgtcgatcgacaccgtcgtatggaatcgtcttagagaagagtgttccatagggtgtcgatcgacactggaaggtgtcggtcgacatcatctctgcaactgcgagctccaactcgtcttcagtatcaaattcttcccacacatcatctccttctctgatcaagatggcattacagctcttccttgggttggcatcaggatttccaggaagaaagccctcttatctcttagtagattatgtagtttgagctacctgtacatctagcttcttcaagtgagagctcagattgtcgatcttcccattaagatctgtgtaaacagcatcaaacttgccattaaactccacaacgatctttatttggctctcaagaatctgctcaagcatggattccattttgatctcagatgagggtggagtgggggggggggggggggggaacttggttagctgaattaccatagttcctctgaaagttgctctgaggaaatgtcttttggaaggcaggctttggagtgtagttcgaggaactctggttccctgtaaacctgttgccactgaagttgccatgtggctgtccaaacttcttgtagccctgtccatctatatagaagactccctcttcagactcagattcaagctcaattgtctcatcctcaactgcaaagtagacatgcttcttccctgtaagcaagttgtgaaccgaatccaacttagcacttacctctgccatttgattgtctgaaacagctccaacaatcttcttcctctcaaagttagcattcttggtgttgttactgcaaataagattctctatcacagcggtagcatctgctggatacctggtgttgaagttaccattgcttgctacatcgagagccatctgatatctccaatctactctgatgcaagaattggagctaatccatcctttgatcacttgatgatcaggagttccaaacttgccacatggaaggtgggatgatgaaggtggtgatatgacacgctggcgatcgcttctcttgtgtgggatcgattcaaggggaattgatggatataagtgtgattgactcgctcaatcggtggggtaattgactcactcgatcaatgaacgaatgaaggatgttgaatcactcaacaaacttaatccgcatatcttgaagtacttagtgactcactcacaaagaactacagaacgatgacaaagactcaaactttgacaagaaaacgtttctactactttaaaatgatcaagggtgttttacaatgaatgagaaattgataataggtttttagtcaattaatcctaaaacactatcttgtcgttgtagtattttaggtgtcaatccaaatgggtgtgatgcaaacagatgagatatgatcagaagttgctaagtcaagccaaacagtatttggttggttttctaacagtcctagtgtttgatgcagaaaacaataaaaaatcacagaaatgactgatatactcgatcgcggggtcgactgccagaagggaccctgtgatcgagtacaacaggatgatagagagtaaaaatggaaaaatggaccagtttactctatcacacagtctcaccgccagtagcagggtgtgatcgagtagaatggttgaaaataggaaaaatactaatagcaagtgaatgaagcaggtaagtaaacagagaaatcaattggatgagaaactcctaaggatggggtaatcgaatagtgtggtctccctaatcgattcagttgattaacaaatctcaattaagctattcctagacaagaagttcaacaccagattaattcactcatgtgatagaaatcctcaagcatagctagacattgacctaattcccattagcgatctctaactaagcaggaaataagaaccgactgttaaagccaataaccgctctaaacggccaatcccttgggatagagacgattatcactggaattagtagatccaacgttccattaaacgccttctgagcgctggaacttcggattccagtggatcagaaaggaataagcagtaaacacaactaatctagaagggattcaatgaatctacacttaaccaacagatttgaccaggggttccacaactactctatcccatcctcagaaatcctaatcactactcagacaacatgctcaaagacaacaacatagaaacgattgaagattgcatacttaaaagattaaaggaaatgaaagcaaaatctgaataacttagaagaaaaatcgaaatacaaagttgtaggaatgaaaagcggctactgagtaagttgcagcaaatctctgtaaaaaagtctgtgtaagtctctccctagggcaaaacccttagaggcttatttatactaaaaacgataaggataagaaagcgggctccaagcccacttaacggcccatggacgatgtgatcaagagtgtcggctcaaagcaggcttccgaatgggcttcgaatgggccttctcttctcttctctttccgttgctaaggttgtctggttgtgtgcagattgattagagggtcgaggtggtggtcgagtaggttggtgacagaatggctgcttccctctctactactggtgatcgagtatgttggtggaaatgggactttatgttctgtttttcctctttctgatcaccaatatctccaaagtacctgaaacaactccagaatgcagaatgtatgcaagactagtcctagactcgactaaagatgcaaaatgtacaaaactgatgatgaatgctatgaaagatggatgaaactagactcaaaatggtgataaaaggatgtgtaaaacatgcaaattatagacatatcggaaatcagcttatatagagctgagtacaacgttctaagacttcaaagaaagaaacaaaacattaatgaaaatattggacattaattgtagaatatgtccaaataaggcaagtgaggtgtgccttgtatcttgtcaacttggggaggaagttttgacgtcttggaaggttctggaaggtctcaatattctcacataagcgcacaaacaaagaaggaaagagttgttggaaattgatctccttcggctccatatatggcaagtagtaactccgtgagtttttatatggtaagaggtaccaaagttcgtgtggtacatgtcttgtgtggtctagatgttctcctggtttccatatgtagctttaaggtgcgtccaagtgtagaataagaaagatttccttgtttggcttcatttcgtgcggtacttcagaaggtagttcagcgggtagttcagcaagtaggttagcaagtacatcagatatatgtacttgtgatatcttcgaatcatttgcttggtaaatgattccttgatgacttgatgttgcctcgttaaaaacctttctatgtaaacccattgggacaaaccctaaataagggaaaaagagtgcaacggtcatatccccacaatatggtgactcggctcactgatctttgacccttcttgaatcatcattagtcttcttaggattattttgctggtgaataattaaccctaggccttgtgcctgattgagactccaattgggcaaaagtcctccaaaatgctcctcatcaatcgctttattaattaaccctatgccttgtgctggtttggtatgctcccggtttggtttgatttggatgtccgcatcatactcctctaaaaaaggtaccaagaagttgtacctcactgaagccatgatgcgggcagtcccgttgatactccttgaagcgaacccaagcggccttgaaagcttcagctggaccttgtgtgaaggtagacagcttgtttctcagctcctcagacttagcatcatcatagaaattgttcaagaaagctatcttgatgcttctccaagtcttgagggaacctgcctttagttgtttcagcaaagaagcggcttctccatcaagtggataagggaagagcttgcacaataggtagtcctctgagactccattagctttgatgcttagaacgaggacctcaaaacgctcgatatggtccattggttgctcatgagataagccaggcttaagctcatagtcgttcctctgaaagggtgggggtacaatcgctgaacgattagcatagaacatgtctagcctattgaaatccccgagagtacgacgtggttccaaagcttgaggaatagctgcaggaatttggggtttgtgtcgattgacacctccacccacttctacgattaggatggaatacatgctagaacaaattcttaagggccaagtgatgacgaatcaacggattgatagtctgtacgatgatgttcaggacttgaatgctcggatcaacatagaggatgttagtgtagttcagtcagagagtagaattcagcaccagaccttagagtaaccactcacgactgcttgccacactgatttgcagaacaaatcgacactaagtcacagtgtcgaccgacatgacctcgatgtcgatcgacactcttttggaagacacaatgcttcagcgtttgacggagcaaaatcgagtgggctcgatactgaagtatcgacaacagacgattgtgtcgatgaacaatggacaagaacatcaccatattatgttgagattccagcggttgtaatgactgagcagcatatccttaaagctcgatgttacagatgtttcacgctgtgtagacaacttctattagagttaccttatgttgacgtcatgagcctagagtatgtactttatgattatatctgggagatgctatcgaaaggtatcagtgctaaggacgcaagcttgcttaacgccgaaatcattgcacttctgatgtatgatgctccacagacgataaaagacaagctggcagtacctatctctacaatagtcaatgccatgatgcccgatccaggaagctgtgtactcgatagttgtgtatctacagagagtcaaattgctttgaatgagagtgatgtggttatgactcttgacatggacaagttgaagaagctacccaccatagattgtcaggcactctctgtagagcactccatagacactggtgttgagatagataaggttcatggtacaagctggcagctacaaaaagcaagtcacgatctaattgttgagaatggatctacagcgatagtgtcgatcgacaccaccacctttgtcaatcgacaccccacataggctgagccggagttctttgttagagctagtttttgggatgagttcactgctgatactccaggcactacagtcacgtctcccactctacctccactttttgatccacctccgaaacggcaaaggtactcatctccccctcctaaacctcctgatttcatcaataagactttaaaatctccaaaaacagttttacggttaagcaagccacgagtttctcgtcgagcgcttgttctttcttttgatgattgtgcaggaaagcggagtataccagccatacatttgtcctgccctgctgacattcctcacttccttggtagaccgcacacaccgactgcttatacgccaccttggatgatgtgaggatctactaggaagtatttacttcctccatctgatccacctcatccccaaactccaccaaattcaaggtattgactctaaacaagcgtttagtgggaggcaacccactggtatggttttctttttctttttcttttatttttcgtttttcttttatttttcttgcttactctggatttgaatactactggggacaatgtcgtttaagtctaggggaggcgcttacgaactatgtttttttttctttttgagtcttattcttattcttatttttctttttgagtcgttttattgagtcaaaattttgttaggaattatgatctctattctttagattattgcctgggtgattaatgttgcatgttcgactcaatccgacgattggaaaatctagatggcaaaccaacagacttgaggatatcctagttttccaacacaaccactaaggccggagctaatctcactgctcttccttttacctcttcaaacggttagcattcatagatcttgactccttgttcataccggatactgagaccaatgtgataaagaaagtgttcatctccccttataaaagaaaaaatgaatgattaatgggagattaatggaattttaaaaaggtgtataggggtaggaatgtttcctatgaccccataattatacattatttggaatgatcaattacaaaagtttgaaaaatgctgagggtgtcgatccagtatgcgagttcccatttgtttactttttaaaaagaataagtctgaaggagagaaagaacaccaaaaaaatatatatatataaaggatggtcgatttatcatggtatagtacaagaatgagtttagaaagatcttgaatgttagcttgtttgatgagacccagcgatgaaagcctggtggatatagttgtggaacttaggtatggaatctagaatgttatgtaagcttgcagagaagtacatgtaagttaggatttgattagactttatatgcatatggatttggttaggatgatcatggcaactgactagagaatgttgggaattcctgtgttttcaaaccccttccaggggttcggcttttgtgttttgcttgagggcaagcaaaaactaagtctgggggagttgatatatccctatttttaccgattttaactatgttttaggtataggttttaaagtctaattgttatttctaaagtcttttctaatccttttcaggtctttacatgtttgggatgcatttggagattatggagcattctggaggaaaacaaacaacttacgctgcagatgcaatggagagacgaagatgcacgtaggtgtcgaacgacacccacctcatgtcgagcgacaccaatacctgacgggaattcgaagacgcaacttattgatcttttgaagatttctaaatttggcccagaactttctcctatgtttaatgaaggcccatcacatgttttagacatataattaggtttttagggtcattgtttagacgtaagcttggagaggctattctctatctcttttgtactttgggagcaaaaccctgtggagactccctagagagaagatctttcttactcttttctcttgttattttcatcatttatttcttattcagactatgatttgtgtttctttgatcatgtcttagtaatccacttgttaggtttagggtttctcattagggatttagatattttagtagattgcccccttgctaggttatctctaggaattcttcattttgattgttcttaatgctagttctagagtagctcactagaccttgatatttgataatatgtatgcccaccataggtacttgctatttgatccatcatagatgagcctacgcatttaagaaagaacaggtaggctcatagaagggctctggtttagatactaggtgaactaatcaaacttaataataatgcatactttagtataggatttctcggcttctccggttatcttagctctaagtatagagagttttgcggagcaccacatgttactctaaaatcatagtttgagttcgagaacggttcgataacaacctagctatttctagatctactatcatctatttcctgagaataccctaagcctgacgcttttaatatcttatcttagttccatccaatcgatttctattgcttaccttttgtttctctttattttgattactgttttacttagcctaattcaaaaccttagtatattgcgtgatccgagagctttgtgcattgaatccctaagtgctgcaactgacctctttatttgagagagtggtcttaagattaatttgacctatatcaaatttatcagccctcaagcaaacaaaaaatcttaagttgaaggagaggtttgaaggtaggaattcaaaaaccgaagcatgtatatagagcgggtgagatcaatgtccaggtagctaattctaggttgcaaggtgatagatccttacttaaaattttttgccatactcgtcacaatgcaacctaacaatctgccttaatctattcaagcattcacatcaaccaattccctttaacatttattaagcacaaacattggatcaagcaatgcaatggttatgaactcatttggttttgggcttaggctaagagacaaaaatggtccgtctaatgaattggtcgagaaacaggggactctcatagaaaagattgagatttagcagaatgctaaaggtaaaagccaacagacacatacaagtacagactcccatctaccaagtgatatatagtatgatagctcagaagatgatcccaatcccatagatgtcctaactcaatccttcttcccattctttctgtttttggttcaagttctaaggggtgcttctttaaaacgattcaagagtctagcgggtttgattttaaactttgacaaacttaaggcttttttctaattttagcatagaggacgttttacccttttctttgaactccaaaccctttactagactaacactttcttttgtatcccccttaagaactctaaactcttactctctattttttcttttcttttgattcccattctcttttccattcattccatacacaatcccaatcccgaatacaattctccacctagtcatagctaacccaaaaagcatgggctaggtctacatgaaagactactcttgtcagttcatacctaacacgttataccaagctcaatcgaaaaaagacctcacaatcacacacaaatgatctttggcttgaaataaggttaggcccagggtatgggaaactgctctaaaagtgagagtcagctacttggattaacaaagggtggtgaagtgaataagataatccaagtatgtatatggtagccattagttcacaaacaatgcatagacatcataattgcaaattcagttcaagttctaatagatagggaatggcatcagattagcgagtttcgaatcaaagcagtatagtcaagttgtaaattcaaagaagggtgcggtcttactacagagatacaatcggttatgcaacagagaactaacaacctgggcattgaacttacttcgctgaatcaaaacatgcttaacagtttgaaatcatcattatcccctatgcaaatgagcaatcctaaaagcaaacactctatatacaatcctaaaatgaaatgcaatctaaatgacactctatttttgtgaaatcattttctgaaaaattttcaaatttttatggtttgttctatgttttagattatgcaaaatttgaaataagaaaagagaacataatgtcaaacatgtcttgaaccctcccccaaacttaaattacacagttccttgtgtaataaaaatctgagaaagaattcaagaccaaaacacaaaacacacaaagaaaaataaaaagctatggtatatacaatggtggtggtggtggtggtgttacatcagtaatcaggtgaaatagacggagaggtaatcgtccatactctcttgagtataagcagagactgatgttgaggcgggtgggttttgctcgttctgtccagtcgaatagttggtcgagcgtgtggatgctcttctctgcctactccttggctctctcaactcggttgatgaagctctgggttgatcgatcctttcagcccttcttgcaatagaacttgtggacccgcttattcttacttcgggggtgggagacggtggccttggcttgctctggaagtctttgatttgagcagccatactcttcagcgacttcttcatggttcttatcttctttttgaaacctttcattgttttgttgtgaaggttcccaagctcttcaagcacactgagcttcttgtgaacttcagctatctcatctcctccttgatcagcatcttcttcatagtgagcttgctcgaattcgttggtctcttgctccggttgttcgctatgttgctcgaattcgacttgttgctcaaactcaacatgataatactcttgttgctcatactcagcttgagtatactctggttcatcttctctagctcttccgatgtcgatgttcagggcagagggagatgacatgaagttgatgttacgccttgtcttaatagaagtttggttctcgcaaggtaggggtaacaaagaaggtccaagctccggatggttgaacttgaagaggtagtgatccgccggagttatcttgtcaagaatatccttccccttgagataatcgaggtcgaggaacttgaggaacacgtcagcggttcggaattgtatccctgcagctcctaggattggcgttaagagaccaccaacacaaagacttccgcgaatccccgagcgatggatggttgcagcatactctctatagctcaataggtgatccaaaagaacgacagtctacgaagtgtctcctttatcacccgccatcttcctcccatccttggtctctctcagaatgaagaccaaagcttgatcaatcatgcatagctctccttcatcaacaaatcaggtcttctttggaaaagggtgttggcgatgcatcggtgggggtatctaatcactggacttcgaattgaagaagtcttgctcttggcgggcgagtagggttttggaccggcgattgttgtccaaagagagtgtagctcgtcttggtcatagtcttggcggattcgttttccacttggaaacccaaaaatggtatcaaagtggctaatatcaagagtatactcgacacccctaaccttgaaagttatgtaaccaagacctcctctttcttctttctctaaatcatcaacacaaaagtgaactttgagggttgcaaggagttggcagctctcctctttaaatcccccacattggcagctcatgaacattgcaagattggccaattccatcaagtattgcatatctccacaaataccaagctcttgcatctttttcttatgagggtatctagttccctcaaacttcaactccttcaagtattgatagtactcgcttggggttgactctctcttcctccttggccggtttcttctcccaacaggggctagtgtatcatcctcgatgatctcaacctcttcctcagaaaccgcttcttcaaagactgcctcttcatggtgttcttcctcagccttaacaaccctcttgcccctagctacttcttctctttgcatggctgagcgacttgaacttctcccttgaatcaagcttgatctttgagcacagcgagcttggtgaatttggtgttcagtcatgccactcatgtcaaacgcctcaacttcttcgttatcaacaaaatcttctagcccgagatgaactctttcttcttgaatccatggagattggtggtgagcttcaataagacaatcaaaaacaactctccaaaaggtatcaatttggaaaggattcggtttttggtgatggaatttgagcttaaaaaccggttgaaaatttgaggatgggattgggaatgatcgagtaactttggtgaagtatggtgaatgtgagaacggattcttgagaggtgatagggagagtttggaatgaaacttttgaagctttgtgaaagatggagaattcgcgaaaatgagatgatgaaagagagagtttcaaggatggtttggcgttttcaatgggtggaggaggatggtctttggttctctcttttggatggataggaaagtcaattggaaatagtgaggagcatgggtaattggtttgtccaccgagtaatgaagtgaaggggaacatgtgggccactcgacctcactccttggtcgtcgaatcattcccgctcgagtaattgatcgagtatcccttgaagtgcgtaatacttgatcagatggtggaggttgctccattctttaaaatgcttgatcaaacggacttgaataaacctcatgaatttactcgatcaaatggtgatgaggcttctcttatttcgtcattcaatcgcacgactcaagacactccacctaatgttactcgatcaacggtggagatcaccacttgacttggtttgagtttactcgaccgttgacttcttcatggtcaatgaaataaacctgaaacacgtaaaacaaaaacattaaaaataacaaggaaaatataaagttatatacatggatagacataagacttcctcgcaagtgagcttattttaagtcactaagcttgactcttacaaagcttagtcagaaaaaaggttgaagggaggaactgagaagtcctcatcttcagtggttgaatcttagtgcctgaatcatactctacatcctcccttgacatatggtaggatgagtactcatttgatttttcttcaaaataagcttccttttgatcagcagagtagtcttcttcttgtgaaccacgttcctttgaccaattctcaatttcaaaactggggtagcctttaatcatttcttgaaggtccagaatggtgctgtttaactcttccatcttattagttaacttcccaatggtatcctcctgagctttgtactctatcctgagttccaaaagttctccagcaacagaatcaaaaatcaagtgttcttcttcagtagaggggttgatgggctgtttaggcacttcaggagaacaactcatcctctaagcttccttcctctgaatgaactcctttctgatcttctggtgcaaaccattctgttgtaaaatcattgtcctcttggatagctagtgcaatttccatcttctctggataaatactcattgaatacttattaactcttttttcaaaatcccaaagttgatctttcagcttcatcactcttgaagataacccctctatgactctactttgacatttatttttttttctcatctcataccagtcatcttctgtaggatcttcagtctaagctaacccttttaaggttttcttcttgtggtcaaaagttctcttcagcttgctgagttgagaagtatagttgaatcttggtgggattccagcttctgtttcttcatcaacattcatgtcatgcacttcgcaattctgcccttctcctgttggttttcctgaagcatcgctgatgttaaatttcatcttcatgcatttttcaaggttcagattaatctttacattcctgacatctatgactgctccagctgaagcaaagaatggtctatctaggatcagaggatcctttcatttttcatctatgtccgataccacaaaatctgtaggtatctcaacatttccaatcttgacagacagattttctattagaccatgggggtgtgcaacagaaccatcagctaagagtaaaactaggttgcagaacttgtattccatgatccttagccttttagctgtagagagaggcataaggctaacagatgctcccaaatcacacaggcacctattgaatgtcaatggtcctagggagcatggcagagggaatgaaccaggatcatcaagcttttcttggataactttcttcttgtaagtttcttgggtgatggcagtactaatcatctcttgattctgatccttcttgagtttttcaattttgaattttttttcagaatggtgagtattcagcaaaggtgtgtgctctatagtccagatgaattgctggatggcaggtgcaacaatttgagttaaatccccccccccttcttaaaccatgctgtccttagtattgtggggctgatgatttggtcgagactcatcttcttgctggatgttgttagcattaatagtaacatagtccttaggattctaaactgctttccctagaagttgttgaggatgcttcagagcagaggttgatgccaattgactctccacatacttgactttggaatttagagcttcaaacttgacatttagatcgttgtaagaacaatctatcttgttgtgtaatttagctatttcttgtcaaatgtcatagctccaatagcttgtccttgaatgatttgttgaataggttgcttaacttcaggatcttgtactgctggggcttgttgtggttgttgagtgaatcctgttagtggattctgctgttggtatcgtccattgaactgctgcttagggacagaaccttggttatattaaacaaatggtttagactgattctgttgtggtggatacacttgatcttgggggttagctacattagtgcttctgtaggagaggttcgggttgggtttgtagttgttgtagcccttgttgaaccctcccttgttctgaatatagtaaagctcttcagtttgatcattccccccttcttgcatttggaagtgctcttcatcagtgatgtagtgtatctgcttccactgagcaagcagaagcttttctagcttttcattcagggccttgatatctttgctctgtctatcctcactgcctctagttcctcacacgaagcgatcatagtcttcattgtagcacccatcagattgtgctagattttcggctaactcccatccttctactacatctttgttcaggaagtttccatttgaggcagtgtcgagcagcattctgatctttggtaaagctcctctgtagagtgtgctcaataatgaagctttcttaaaaccgtgattagggcactgagtggtgtagcttttgaacctctcccaggcttcacagaaagttctattgttttttgtgtgaacctggagatctcattcctcaatctagctgttcgagcaatagagaagaacttggcaagaaaatttttcttacaatcatcccataaatttatggagtttaggggcagagtcttctcccagtagcgtgccttgtctcctaaagagaagggaaatagtctgagcttaaacatatcttcagtgacaccattgatcttggtaaggccacagagcctatcaaagctgtcaagatggtccaagggatcctccataggcaaaccatgaaatgtgtttccttggatcatgaagatgagaccactcttgatctcaaagttgttgttctgaactggtggtagcactatcccttgtttttggtgatgattccttggggcatcaccagcaccaatgtttcttggttgatcaactataggtgggtcttgaacatcaacttgtctgttctattgatccatagcagctggtctttgctgatcacaggctacctttgctttggtttcttgtaactcacgagctattctgtcaattctgtctttgaaaggtaataggtgtgcaaaacctttggatcgagtttgcatgcacaaagattagtacatgtaccacaaaaacaagcagatgaaaagatgagttagtaacttgataaatgtaaaagaacttgatcttaattttttctgatatcttgaatgtaacaatgcaacaatgaattggcaacgacgccaaattgataagtaggtttttaggcctacttatgtgttgaagtgtggtgtgttcagttcaatttcccttaaacattaacatgtcgatgcagttatagggggtgtcaatccagtccactgttattgctagcaatcaagatgtgtacagaagcaactaagtcaagccagattataatgatggttggtttctagtaacaatcctaggtcaagatcattgggtcgagtagaaccaacatgtgacaaatttaagaactaaaatgcaatcaacaggtgaataaaataacaggtaaataaaagtgcaatcaggggatgaatacaaataaatctaagaagaatagaagtcctaaggatggattcattgataagggcaactctaaggttcatcaggtggctaaaaggcgaaaggcaggtaccgtaaacgatagattcaaaaaccgggtcaatccactttcgtgacagagacccccataactctaccactttcgaatctcaactctcgttgatgaaacatagcagagcagggtttaagcaacaatctaccaaagtcaataagcagtctaaacatctaatctcttgggcaatagtctacaaatctctgaaattcgtagatcaggcatccatttgaacgtctttaggacgctggatacctatggtcgaattcccacattagccagcgaaaaccgcataggggccaacgaatccagaagggatctagcctaatcttaaccacctgactaacctagagatttccctaatctaatccatcctcaagagccctaatcactactcatgcaacataatgaagaacaccaacccagaaattactgaaatcatatcaaaatgtagatctaaacaagataaacaactttgctcaaagaactaaatgcaaaacaaaatagattaagagtaattaaggttttaagattcaagaacacaaagaaaaactaagagataaaagcttggtcctttggacaaatcccaaagtgacctatttatactaaaatgttgaaaaccctagattcactagaagacaagagacttgaggcggtttggatgaatgctcaatcttcgagatagagtaaagagggtgctgtaaagtctgcgcctttgcctccatgctccaagtgataaattggtcgagtagtcgcttctttctctcctattcttatgctcatatgtctggttgagtggggaatgaggaggatcagaagacgctttgaatgatcaacaagtcttgtagagtaggttgcctttgatccagtaaactggtcgagtatatgatcgagtagggggtcgagtagaatctgttgcctcctctgtggctgcctggatcgagtaaactggtcgagtagatggctctgctgcttccctcctggtttgatagagtagagggtcgagtagatttccttgtaagctccttctacacctaaaaacacaccaaaaaattcaatatgaatgcaagatgatcctaattgcctaagtatgcaaaatgagctaaatgtgatgcaaaatgatatgatacaatgagtgatcactaagttaaatgatgataaatacatgcctaaaatgagtaaaatacagtgttatcacgttttcccgatgaagtagaaataattagatcacaatcaagacgtctatgcaaagctcttgcttcaaggaactcagagtagctgacagcttgtccatcggatttaagatccatccgtatttgaccttgaaagtttgcccaaaatcatctcaagttgtagaaacctagatatcagttctgatgcagcacatttagaagaacgtgggagatttatgtgaagtccgatcgggatgaaacttcgtggacttattcatgatactactggctacctatctaacggtgggattacgtttataacggttagtctttgacttatgcatatgttttcgagacagatttatagagagtaaatcgtatcaaagttttatagtttgatggtgcaaatgaacttggcttgagctgaagctttgtaggagctttcatgacttctggattcaggtcttggttgaaggagaactaagttagagcttatgagcatgtggttgcaataaagattgcctaagtgaaaggaaaggagtcttcatcttcaactaggctaaggtgagggtggtatttgcgaagcatggtatcattttcttttgttatgcttcttgacgcatgatatgtaggcttagatctgattgtataggataagattacatgatgatatgactttatgattgttcagtatgatgtttgataatgtgatgttatgtatgatattataagtatgtgtatgttaagtatgattatgagtatgtatgtatgatgaatgtatgagtgggagaatcgagctatgggccgtggtctccctagtgatgtggacagtgatggaccgacagtttaacacctggtcaagaaaagctgacgagcccgggatgggagtgtctcagccacgagggccagcctccactcatgagcttctagtcatcacgaggatgactggacctaacgatgtgtatgtttatattaatatatataagataatttttatgaatgtgttgttagaagttaaaacatgttaggttgattgcgtgtgtctacgtttatatattatgatgatcattgtatagctttagaaagtgttctatgtttcagtgggcagagtagattcccctcactaagtattctttattcaccctttttttcctttttttcctcaggttagtaagcgtgaggagttatgtgcaatgttttgttcgtatgtgaattttaaagaaaacattttggcaagatcagatgaataacatgccgttttggcctatatggcgggacgggtgttatatttacctcagttaatgagtggtaattaggcatccaatgctaatatttgctaaatcaagtatttattccatcattgtttcttttgctagcgatgaaacctgagctaccagattatgagaagcgtaatgttaaaattcaggcctaatagagatctattgtgtacttgtggagacggggtcccagagaagaggtaggagaagaggtcgccgccagaggtagtgaagtcaaggtcgccaacgatctctttggtagcaaatcctcgctggaattggcctcgttgtttcatatgactctacacaagaaaacaactaaaactacaaaagagtgcaaacaagattgtattcattttttacaggacattagtgactaatttttgggaggaagaactacgtcctgggttgcaaaaaagtgggttgtgaagagtataaaagtgaagagaaaattgggttgcaccaaaaaaaagtgaagagaaaactaaggcttggatataagtgtgtctctaattcccgccctttttgtaagtaatttcttgggtacagacaaaaggttatttttaaaatttacttaaaaatgtaaatatatatatggtttactattggtcatggtgtgaagagacatcttctcacatttattataagaaaaaataattgaaaacaaaaaaacatatcttgttaaagttggagtgttagaaatgattttgaggctctaggtaagtaactaatgctctctcgttaaagttggattgttagattcattagtaatcggttcttttcgctaaagatatattatcaaaatgttttacttttaattttctaacacaacaaaatttattactaaaattctctgtcaattaagttttatgaaaaaatttaaacaattaaataaatactatattaattaattattaaatcaaaatagcttaaaaatcctagattcttccctaattctcttgttctcccaaatctctcgagaagatgagttccatatactattttattatcttcttggttgttggtctaatctgctatgtggtttatcagatttagatctctagaattccaaatcctgagtttgaacttaaaacaaaaaaaaaatcctgagtttgagctgcctctgtggaaccctaaaagtcaaatctctcaaatagatgaatcgtataatcagactttttcagccctcctgatattccgacgagcaaggactctttcccagcgaccgacgactcttttttggtgacttatgaatcttttcaggcgatcgacggcgattatccagggtaagaagatgatactattctatttagcaagtgcaacaggccaaaaattttcttcaagttcaaataagacaaagcaatcaaaatggatataacattaataaacagtgtttcaatatataggcaggaggtttaaaattatataaagaaacatacattaatactattggtgtgaattttcaatttaggacaatcttggcttagtgaattattcgctctctcctctttattgatgatatgtttaccacaggccactcctagagtttaggagaagtaacccttcttgcttgcttttactccaaccttggcctatgtaaaatattctctgtacaggtcagaaaccgagagaaggcatatgaaggatgagttaaacaaggaggtagaagaatacctgaagatggttgagcatgaaaagccttctccgaagatgcctatgatgttttctccgaggctgcaactgaaatattttcctaccacatctccaacatttaatcagtttctagattaaaaacttatgaagttgtttctgatatctgttttgcctttggttcctgtaacttcagaaggctgattccgccgatggtaaaaaacaccaaagctaagccacaaaagaatgaagaagaggtggaggacatatgggcatcatatttaacgtttaagcggtacttgttcctgtttttggctgggtttctattttctttgttttcccatttcctacgggttctttatctttctctctttagctcaattttattattttctggtatcatatgaagaatgtacatttactactcgtttattttcttgttttctattgctactgtaggagccagccaagatttgtacggagatgttaaagagaaccttattttggttgcgtatggttttggttaggtttgacataatgccttaataaatgtgtgtcttttggattagagcagagatagtttttgggatgttataacataaaatcggtagttatgcatctttgcaagtgtggttctgaaagggtgaaccttttttgcaagataacatgtgtttgtgatttttttggtgaacacatgtgtggctttctgtatgtttctacatgttctcgggtaagttgaaggattctttttggtatgtttttagggaaacatgttatattttcaagtgtggccatcataaacatgtgatggataaggattattatgttgttagttatgtatttgggattaaaaaaaaaaactatcgaaaatccatgttgtttatggttcttgttatttttgttggttatgcttcttggtatgtcactgaacttctgaagaaaaatggatttgcatggagtgaggaggcaacaagagcattccaaccttatatgagatggctatatgtttgtttttttagggaaagaaaatgttgcatataactagtgtttttggagaattgttggtgaacaaggactcatggaaattcaaggtgaataaaattcaacattagggatggtttgaagtttgatgatatttttcagatggttagcgaagattttggtatagataagttgattcatgaggtagaacttagctatgcgttgcctgaaccgatgatgaaaaacatgctgaaagatattcttccagtctttgtgaataatgataggcaattggatagttcctttggaatttgcagatcgatgcatgttcgtctttacatctctgtaaagaattctaaaccaagagcatcaagatcaaagtttaaatttttgtgagatttctgtggttttttggagaaagtggtaagaacatgattggaaaatcatataataatgttggcaggtagaatagtaatgctgactgaagttgagttttctaacttgcatgatgagaatgtcattcaaaaggagcaatggttcaagagtaaatcagacctgtcttggaaaatacggatgcttgcatgtgaacgaaatttcagatttactatttacaagtcagagcccaagttgttggttataaaatgtgttgacaagaactgtaaatggaagattcaatgtacaaagaagaagacatgcgagtatttctgggtaacaaagtatatcgacaaccatacatgtctcggtagaatcattggtccaccaaaagcttcttccaaagtaacgagtaagcttattttggataattttagaaatatcggtcttagtatgaaaccaaatttgatcttgacaattttgaagaaacgatatggtattgattcaaaatactggaagacatggaaatatagagaagatgctcatgatgaggtattgggttctccaaaaagaaactatgctcaaatgcaagtattcattgccaagattaaacaggctaatccgggtaccataacatattttgagattgataatcactagagatttaggtactttatcttatcatttgctacttatgccaaagggtatgaattcatgaggaaaattgtagtagttgatggactttcttgaaaggaaaatatggtggcgttttgctgattgcaacggctcaggatggcgactctcatagttatcctcttgcatttggaatagtagattcgttgaatgatgcatcatgggatcagtttttcatcaagttgaaatttgttgtatcaaataatcctagattagtaatgatatcagacaaacaatcatcaattcaaaaagccatttcaaacgtgtatccaatggctcatcgaggaatatgcacttatcatctcaaaaagaatgtcatcactaagtcgggaggaagtaagattgctaaactcgtacagacaacatcaaaagcatacacttcaaatgaatttgacgggatttttggtgagatacggcgtgaaaattacaagttgggcgtatatttggtagaagcaaatgttcgactgtggtcacgtgcttatttttccggagacaaatatgacactactaaaagtaattcagcagaatcactaaataatgtgttaaaaaaacctcgtgagctacccattctatcattgcttgaggtaataaggaatacacatacacaatagtttttttatcgtcgagaaagcgttgcaaaattttgtacatctctcacccctagaattgaaaaagagctctataaaaggtgtgatgtgtcatataattttgaggtgcaacctataaatctgcatgagttccaagtaactgatgggtcacaaaattttgtggttgatttacaacggatgacttgtacgtgtcatgtgtttgatattgagaagatccctcgcaagcatgttgctaaggctgtaatgagtcaagacatagatgatgggttattagtgcatcattactatacaaagtctcacatgtatgttgcatatcctgagagtataaagcgtatagatgaactttcagatttgagcaagataccttctgatgttattggtcagacttgtcttcatctagaggtccaacaaaagactaggaagacctaaaaaagaagatatcaaggttttggagaacgcatgacgaagaaaaaggcacgaaaacaacaagcttgctcacaatgtcatcatttgggacataatcgtgcaacatgtgactttggtttttgttttcttttgagtttatgacgtttttatttgaaaaactggcattttgtatttgaatctggattcttctttgcttgttggggtttattttttgtttttcttttgagaatttagctcatcaataatagtttttttttgttaatttggtgtgtgtgatgggtctagttgattcttgcgtttttctttttatttcagggaaactttccatctactagtgtttatcctggaagtaattgtatagatttaaaaggaccagagattagcatggagttgacaaagttactgagatttttgaccctctatatactcttctccaaaaagccatttgcagtgttttaggagactgctggttataggggaattaaacaaggctgatgtgattaaaacattgaacaacgaagacttatattcatgaagatgtccttcttgggaagcataaagcaatggtaggtcatgttaatgtgattttcttcgtgctattacttgtgattagcttgtttatagtaactagatactttgttttccagactagaatttcaattttgaaacaatataaattcttactttttggatagcttctcctatgaacatatgttttggaaggctagaaagagtttgtctcacatagatatttgaataattgtagatatatattcccaataatgattgatccccattgttgttcatgtattaaagattggacataatttgttacaaagagttttatcagttgaattgtaaatttgataaaatggttatcatactgttgatacgagactgtggttagattgattaggatacggttaggacgcttaattagagctcggtggttgaatattttatacttttgagctctgttttgtttttgtttatatccaaaaccataaacaattgaatttgggaaccgtgcagattatgcagcttgcattcacgattatacaaaataccaatttcaaaatatatcctgctattgatccgtggcactcataacattaaagatatgttaacagcagcaactagtgaagtggaataaagctaacaacttccacaaaaaatattattatttttgtaataagaaggtatctttcttttctctattatctacgtataacaaagaacaatatcataaagtattagagtaacgtgtattgtaacgtaacatatcataagtaaagaaagctgcttaatagaagatcataaaaagaaaattaaacctcaaaaccaaattcaaaacaaaagaaaatcaactagagatccgtccaatggttaccttccatgaacatatcggttgccaacttttttcgaatatccttgatgtttgcatcacataccccaatcttcatatctacgtctaatgcaagtcactctatatatttcaaagtataaactctacaatcacccgatattttgttttgtgatatttctccacatcttctgattttgtaaccagcatcatttaagtcatcttgttcagcagaagaaacaaaagctttgataagatatggatccaaaagtgcgtacacaaactctttaatctcttcatcgctagcaatcgaagtaatattattgtatacatcaatgtgtcagtgaagaatcgatatatccaaagcaatccaatgaacatgtttgatgtttaacaccaagaagacttcatcaacatccactcccattcttttgttggtcctattacattttggcaaaacaccgttgtaatagtcgattaatccagagctccaatcaattttttttggattttccaaaaacttttcatagctcctggatatgtgcacaataaatggaacatcaagaaacgccacgtttagtgtgaaatggacatgagacttttcctaattgtttctaagcaatgacatgccaacatcgatatgctaccacagaaaatatgtaagttagtttatgtaaagaaaatgttttattattaataaaaaatacaatttacttacatcttcacttaaccaagtttgtggatcaataagcttcacgaaaaattgcttgtctacttttatggtgcccaaattgacaattctatttcagcaatcaattatacatgggtttaatggctattaatgcaaaaaaagaatatttttttgcgaaagtatatacatgtctatctttaaccatcagtcaagtcagttagcagtgctttcatctactagagcaaatggatcatattgatctgagttcacaacctttatggttcttcccatcccttcaccaatatctaataacaaaccataattttctatttgcatatcaacggtatccttctttctttgggtgtgtttgttctctttggtcggtgtcatgttcaatatctcgacagaagaatctgattttactttatcgtaaaaagtcttcaaattgcttttctatttttgtaaaaacaaaatatttggatcaaaataaattcataaatatcaaataaatacatattattttcataaattgatgactttgtaccttgtttgtttttgcataacttttgcaagttggtttaacttgtccttcatatttgaaatatcaaagctaagggtccgaatggtaaccacagtttttattttgcggggaaagcgttattacagtgcggttcggtttaactgtggtacgtgcggaagaaattgggagacaagtgcggtttgtacaaaataagcagtatagaataatgtttgattgatgaaacaaactacttgcggtgcggattatagattatatatatattaataattatttattttttgtattaataaataaacaataacagatatttataaaccgctaatacaaaaattgataaaaatataaatttaattttgtaacatacatagcgttacatgagttgactaatttcaccacatattagttttactaaattattatatacataatatttatttataaatagatgcaccaacctaaaaaaaaacaaaaaaaacatataagtgtaccaacatacagataacctactttaatatatttatatatatatatatatatatatatatatatatttatatatattttattttattttattcttaaaatattaagtaaatataatacttttgttgtaaaaaaaaccagagagtataaagtattttctttggaccataattgtttgcatacggatagaaaattaaaagtggatttcacttttgtgaggtatagaaaatcgtgcacgtaattcatcttcttattataaaaaatgcaaaaaaaaaaagaaaaaaaaactgtgattggtgatttgaaagcattttttaagaaagttttgaaaaccgcaccgctttattattgccattcaaagcaaccatagtgattaatttctaagtaaggtttctatttattttttattaataaatttggatagttttgtaatttagaaattgtttagagttttagaaaattttatggtccattggtggaatccttaagtgggtttctaaaacaaaaaaagaaaatttaaaaaagaaaatttgttaatatttttatttgagcaaatatgattattattaggaactataaaattttaaacatacatgatatagaaagagaagaaaaaaaacatattaaaaagcgaaaaaaataacgattacattttaagattgattctggtaataatgttgtcatacatgttcaactaaatcagcttttaatacttcatgtttaatccgatcacgaactcaggctctagtggccatcatattaccgagatttgaaggcatatatgtagcatacgtgaaatccacttgtgaagagctagcaaattcaggatgtacaaattcagatacatcacactgagtgtacccatctcgttcatcctctactatcatattgtgaagtattatacatgctcgcataatatttccaattttcaccttatcatgaaaaagagctggatgtttgacaatggaaaaccgagcttgaaaaactccgaaagcacgctcaacatctttacgacaagctttttgagttgtaacaaataaagaagctttatcaccttgtggatttgaaattgattggataaatgtagcccatttaggataaattccatctgtgaggtagtaagccaaattatagtctttcccgttgactacgtatttcactttcgaagctcgaccttgtaatatatcatcaaaaactggtgagcgatcaagaacattgatatcatttaaggtacctggaggtccaaaaatcgcgtgccatatccagagatcttgggaagcaacaacctataaaacgattgttggttttcctgatccacgtgtatattgtcctttccaagcggtgggagaatttttccactcctaatgcatacagtcgatgcttcctatgatcccgggaaatccatgttgctctccaatatggagtagtcgtataagatcatctcgtgtgggtattcttagatagtcatccccaaaaaaatttatgattccttctgcaaaatgttccaaacataccagcaacgtgctttcaccaattcggaggtattcatcaaccgcatcagctgcaataccatatgcgagcatacgaattgctgctgtagacttctgtagtgccgagaaatcaagtcttccggtagcatctcttctttgtttaaagtatgggacttcattggagaatctctcaactatacgcatgaacaacggcttgttcattctaaaccggtgtcggaatatatggggaggatatgttgcattttctgtaaaatagtcgttcactaattggatgtgacctttttcacgatttcttttgatatatgctttttttttccttggcttgactttttgacaattaccataactctcaactgcttgatcaaaacattgatcaaacttatcatcgaacatgtcatcgagattatagtttgaagaagaacctgccattttagcaaaattatagaaagagagagaggggataaagatgattagatagaaaagagtgtttattattgtgataaagagagttgatggaaatattgaagtatgatagaattgtgtagaaagagttgtgttgaacgaattatatctagaacaataaaggagtggtgttcggattcttattatgcggtgtacattcattcatacaaaataaaagaatagtgttctgtcaacaataatgaatggtacaaatgaaaagaacaatcaagtttgtggtgacaaactaaagtacttgatgtcggtactaaagaaccctcctttgtgacaaactaaagtacatgatgtcggcacttgtggtcgtttccaagtcctacaaaatgtaataaaaagatcaatcataactataacttaaactgaacacaaacattgaaaaataagacaaacataaactgaacaaaaacattaaaacataattgaaactaaaactactcataaactgaaacatgatttctgaaactaaaactactacaactcatgttctgtcaacataattgaaactgaaactacgcataaactgaaacataattactgaaactgaaactgctacaactcatgttctgttaacataactgaaacttaaactgaaactactcataaagtgaaacattaatactgaaactaaaactgaaacaactaaaaacattaaaacataactgaaattgaaactactcataaactgaaacatgaaagtacatagtcatacacttaaacataaaacatagacttaaaacagacactaaacataaaaacaaacttaaaacagacacttagacaaacataaactagaaacaaacacttaacataaaacttaaactcaagccaacaactcattgattaactttttcttaagatcaatctctataatagatagaggttttgttttccctaacagacgctcaagcaacttagtcctatttttcttctctttaataatgattagcttctctttcgctgcgtgatctttatcttttatctcccagatactttgtatctccttcaaagcattggtttcttcaccttcaaccggactttgcttggcggctttggcagctttaacactaatgggacgagcttccttgtcttcaacgccaacagagtcagagtcagcttcacattttcttctctttgctttcccatgagtagactgagcaatccacttttgatcatatctaagctccctccaagcatgctcacaagtaaacttgcagccataatctttcgagaagatctgatgtgccaaagacaccacaaaatcatcattctgaccactagtttgttgtttgcttgcggtcaagtagctccctacaaacttgttcacggtgtcattcacttttgatcacatgtgtttacaacatatgtggcctcttttctccacacctttgagctttggacttcagaacgctgcccccttttgctcattgcccaccatcggatccttggaagtgttcagccacccacatatgagaacaatatcttcaattgatgaccaattcctccttggtttcttggctttcttccctttcttcccagcaattagtgcttcatcttcacttggatcatcatcagaccactcagtgctaaacacagggacatttgttgatccaagttccaagcattcatatggatttggtgagagattgtgactgtcatcttgactgttcaaaaggtttataaagcttgaagtatgatgatatgaattcgttgaatccatatctttgtttgtggttgtgtgttttaaaaattaaaggttctggtgctgtgttttaaaggtaaattatggtgaagttagacaactcacaatcaatcccacactaaatactattaacttaacttcaattaccaagcaatcatcacggttttacagttttaaatgctacaagaactagcatttgatgtttacctacaaaagcatttgacgtttatctaactatgacacttctatttatatcaaccaacaaacatttatcacagtaaataacagtaaagcatattgatcacataaataaatacaaattgataaattaccttgcattcgatctcattgttgttgtcacctttgtaccttgcattatatccaatcaagaaacaaccacctttgttgagaatcgtcaacctcacacaaaatagagagataaagaagtatcatgatcaaagtcaaaaaatttaaacaaaaacattattatatcgatctaccaaaggatcaaaaatcctaatcaaattcatatcaaattcgtttcaaaatcataatcaaatttataggaaaatcataatcaaattcatatcatatcaaagatcaaaaatacattgtatctctaaaatcgtatcatatcaaagatcatatcatatcaaagatcaaaaatcataaccctaattgcgtttacaagaaccctaaaattgtttacaaacaataaccctaattttaataaccatcaaatcccaaattaactcaacctaatttcgacagaatctaaccctaatactaacatgcaaaaggaaacagagaggaatcttaccgtttcgtctccgattgtcaccaagttcgtctccgatttggatcctcgatttcaatttggttcaaagaatcaattttgatttgtctccgatttggatcttcgataatcatcccggtggttgaaacagtcgttaaggtgatatttttgttgctgatttcatgaacaaatcactagattaacgtcgacgaagtgaattgattttggtctctccgtcggcaaacacgaagaaaagagagagaagaagaagaaaaattaaacgcgttttctatatttttttttttttgtcaacttgtttacccaatcaaaatttgccacgtcaggatttctattggatctcaaaaaccccatttttgggaacgatcctaaacggattgttgtgtttttctttcatttgggcccatttcatcttagaaatgctctatagaaatccattaaaaacccttgctggacttggtctcacagcctaagtcttgtgatacacgaatcgaagtattccgtcgttaatacctccatacatgaaaccatctttgtcttttgttttaaggtctcgtaatctttatggttttgtgctttacgttttccattggtttttgagtattctatctctaatccataatacttgtaaataaaataaataatattatgttagatgtattagaactttatggtttcgaatggtgcaagcggatcaagcggtgcggatcaggcagatcaagcggttcatgcagatcaattgtggatcaagcgtattaggcggatcaagtaaaaaaagtgtggatcaaacaattcaaaatctatgttgaatggtgaaatgatagaaaagcggtttcagtagtaaaaataattacaaaatattgaaagttaatattttaagttaaaaaaaaatagattaaagaatattaataaaaattaattctctttttaaaactaaaaattattttaatatatatcaaatatacaatttcgtactaaaaataaaaatgattgtttcattaattataagaatattatgtacatattttcaggacagatgtaattatatcgaactttgatttattaaaagataaatataattatgttttgtatatgttatatatgaaatattataaataaaataaatataaaataacacatgaaaatgactgaaacttctactatacagtatttttatcttgccatagtttatatgcaatatattctctgatgtttgccattacatcttcatcttctacctctgctgcttccatttcatcttgattcgttgcattgtctgtgtagctattcttagtgtgtcccattcttttagtgaaatcttcatctggaaaatttgaaattctaataaaattttgtagtcccattgtagcaattaccactatttttgcacttcaataatatatctagggaacttagaaagaatcctccactttttcttccaaacaccaaatgtcctctcaataacagaccgcaaagaagcatgccatctattaaacaattcatgtttattcctcggaggatgattagtgttaaattgtgacatatgataacttactatcctgtttcgtaaagatctgtacagggtcaaaaatccttttatatatggatatccagaatctacaacatagtacttgtctgccggaggcattggaaattcaggatcattttttttgtgccatcacaagaactgttgtatcatgacatgatccaggtgctccattccaaacatatgtgaataacatatttagatcacatattgccatgatgttaaaagatgttatatcatgttgattccaatacattccttgcaatgcgggtttcacattaacgcatgcatgaatcccatccgtagctccaacaaatccagtaaaatatcgcccatatcagtcatccaactacagccgttcaggaatcctatgtcattcttgtgttgttggagttttgatataatcacaagcaagtaattcagtagctgtcagaacttcaaaaaactttctcttcactgtttcttgatttcgtccaaaccgtaatccaacatctcgttgaacttcattgtgcctacatatccggagaaatatagcaacactctctttgatgcttacattcaatggttattgtaatccataattggtttgtagaatatgacacaatgttgtgaacgcatcaagtgacatccgtagcaactgtagacaagcagcattatcttcatttagtcgagaccaaatgtttctccatcctagaccgcaatttgtttgaacaggtcctctttgaaaatatcgttcatagtaattcaatgatggttgaattagcaactcctcaaattgctcatttttcaaattccacaactcgagtctctattcataacttagagtgtgtgaactttgtgatcttaattaacagatacgaaaagcctgtaattcaatatacaagaaataaaagaaatattagatcaataataaacaccattcattaaaaatttattaaacatacaacattatataaaacatatagtggtttgttaattaaacaaaaacataagctttaacactaatcttcatcttctaaaccactttgttgactttcatttcaatctagtctttggttccccaaatgttgaataatcctccggctctatgtgattgtggttggaattc

SEQ ID NO: 1466 - DNA, 81877 bp, Arabidopsis thaliana
aataaacaccattcattaaaaatttattaaacatacaacattatataaaacatatagtggtttgttaattaaacaaaaacataagctttaacactaatcttcatcttctaaaccactttgttgactttcatttcaatctagtctttggttccccaaatgttgaataatcctccggctctatgtgattgtggttggaattctctaaatccagtcattgtatctgtcaatgttgtctcaaaggcttgttttctacgggcacctcaggaactacttgcgatagcaactcttgagcttcctgcctctttttgtattacttgcacagcttacattcccccgttgttgagttatggaagaaggaattcgggtcgcatcccgggtggattcggttgaaagacgtgattcatcttcaatgttaacacgatacacctcttcattttcttgtgtttcgggaacttgagtttgttccctatcacttccatctatgtctgaattcacatgctcttcttcattatctacaccctcgttcatcatctctactcttctttggtttacagaatattgaggttgtaaatgaagatcatataatgagaaacaacgttccatcacttcccaaaattatggtggttttcgatgaagtgattttattattctacacccttgttaaaaaaattataaattttttatacatctatattagttaaacaaatatttttggttatgagataaattataattaattaccgtttcattgtctttccaccattgttcagatgcagataacatggatgtcgtcggatcaactgaaatgccggtggacgttttcataagagctttccacttcttatacttctttttgaaattatcatgtttttcttgctaacattcatcttgaattctttattgaactttcgagtgataaactctttaccataaggcgtcggatctttaagacagtaattattcatggctagtgcttcgtcatacaattcaatgagtcttctttttcgttgataagtccatttaaaattagcttcactttacgaatttaaaaacatatatttataattttaataaaaaaatatgaatacattataaatttaaattaattacaataataaaaaaattacatgtgatgttgtttgattatgagcacttgtgttgcttttctcaagagaatttgtgtttcctcgacgatttaatgtcatttctacaatcaactggttaaaaaaagttagcatattaatttttattatttaaaatttttataataacttgtaacataataaaatagcataatccttacaaaccaatatatttaattaaactaatttacttataaaattgtgtggtttataaaatttatctaaaatattgtagttaattaaattagttcatatagaataatttgttttttaatttaacacattagtattacaaatgaaaatagtttttaaatttaaactgttttataactaaattaataaaaaggtgttgtgcatttaatttattggttatttaatatcccatttaatattttaaacatatatttaataaatttattaacaatatatttacaagcttaaaaaataataattgttaatataggattcactgtaaaatttatatcctactattatataatagttgcttaaattttacaaataaattaaaatgtaagttcaaatttgtttttaataattttataacttattttacaaaattataagtaatacattcatattgaaataaatgagcatttcaaaaattaataatcatttgtatataatttaattttaaattttctattattttgtaaaattcatatttcaaaaaataagaaatgtattttgattttaataatctaaattactttaacttcaaatgttctttttgattttaaactcattttataaaaaccacaagaaatacatttatatttgtgttactctaaatttcaaaagaataattatatgttattagccataagtttttataaagttatatcacttttcagctattttcaaatcagtattgtacattagaggaaatttgtaaaatctcaccaaaattttaaatatttttaaaactctacttttttatatttgtgtaacgcccgtgaaccggaaaatcggttagggtttgtttttaaatcatccggtttaattggttgggttaattggaaaccgtagagtgtgcctataaaagaagaaaactcgaaattagggctttggttagccacttttcgttttataaaggagaaaaagagagaaaaggagaaggagcagaatcgttagggtttgggagaaatcagtttcgtcatatcaaatcgtggtaaaaggtaacgaactttggtagagttattcccaagtcctttatcgttattctccagtttacagaattgaatttggattaaaattggttgagttattcgcagtttcgtgagacacgttttctcagacgcgaattaggaccagcggaggttgaaactgatatcgtggtctcgtctgttttccgatcggcacgagattttgtgggcagctttgtgacgtctgcggctaggatttcaccgtagcgattgaatagttaacggttagtttgtattttagcgtttcgtctttgagactgcttgtttctggtttttcctgtccagtttgcttcagggttgcttttggtgtggacttgttgtaggacgtttctggactgtttcagacgcaaggagagtctctcctgggtttaattgctattagaatcaatttgttaaggtgagtgcgtgaccatgagcttatctgagcgattgggttgtgtgtttgttttgtgtgatgatatgtaggtgtggtgaatgtgttttgggtgaattgttcaatgactggtttgttgtattgtattcgtgattatacctttttatttgcttgtgtgtatagctcgtagatgggaggatcgcctcactaagtatttatgataatacttacgcatctcattgtgttgttgatgcaggtaaagataaagtgtgatcgtggaatcatggcaaggaagagaggatgatctaggaactcgtttgttttatgtttggtgtttttggttattggaacccggttaggattgtcagttattcttggttttgttgatcgaattatttatttattcataaaatagtatttctgacttgcggtttaattattatgttattggttggtttaattagatatttatgggaatatttaattatatatttttttttaaatgggttgggttgtttcaatttggtatcagagcgattacggttttaggttgtgtagaaaaattaattgatgaattattttcctgttgattgatgtgggatgagttagggtgttagcatattgaggattgattatggagtgtttagtcaattgtgtgttgtcggagtcctagcatcatcttctctgagccttaaatgagattccacagtaagttgtttgtgatatattcgtttgttttagtttcttagccatttgttcttgagtagcgcagatggttagaggagctggagttcgtggtcgtggtcgtggtcgcggtagggaacaattcctcgagggtaccggcgagagtgatggtcacagtgccacagttgagcagagtgtgggttcgcagcctgagtttgtggagcccggggttaggaacggtcttggtgccgatatagctggtgcagccggagtgggggctggtggagctggtgtcggtaccggtgtgcatgccgttggtgctgagggcccaggagtgatgggtgccgcagccggaggagcccagattccagaggttggtttggcgggcctgttgaggcagttgttggagcggttaccaggtgtggtaccagtggaggctccagttgcgccacgagtggcggaggtgcagcagcgggctgcggttgctgaggaggttccatcttatttgaggatgatggagcagttgcagaggattggcaccgggtatttttctggtggtactagtcctgaggaggccgacagttggaggtcgcgggttgagcggaacttcggttcgagcagatgcccggcggagtatcgggtagatctagcagtgcattttctagagggtgatgcacatttgtggtggcggagtgttactgccaggaggaggcaggcggatatgtcttggacagatttcgtggctgagtttaatgccaagtactttgcgcaggaggcgctcgaccgtatggaggcgctttttcttgagctgacacagggtgagcggtctgttcgggagtatgaccaggagtttaaccgactcttggtgtatgcgggtcggggcatggaggatgaccaggcccagatgaggaggttcttgaggggactttgaccggatttgagggtgcggtgtagagtgtcgcagtacgccacgaaggcggcactggtggagacggctgctgaggtagaggaggaccttcagaggcaggaggtgggagtgagtccagcggtacaaccgaagaagactcagcagcaggtggcacctagcaagggcagcaagcctgcgcaggggcagaagaggaagtgggatcatccttccagagctggacagggtggtcgtgcaggatgtttttcttgtgggagccttgaccacaaggtggcggattgcacgcagcgagctgagacgagggagtgctaccactgcagggagaggggacatctcaggccgaattgtcctaagctgcagcggatggcagtgacagtggtacagccggcggtgcagcacggagcgcaggtgcagcagggagtgcagcagttggcacatattgcagcggcaccgcagggttacactacgcgtgagataggcggtaccagcaacagagcgattactggtatgatttctgagactcagactttgtgaattatttttgttgttttggatatcattgttttgtgatgaatgttagggttcttagcacatgaggtttgtgtagagaccttattagtgggcggtgtagaggcccatgtgttgtttgactctggagcatcgcattgcttcattaccccggagagtgcctcgcgcggcaacatccgtggggatcctggtgagcagcttggagccgtcaaggttgctggagggcagtttctagcggttctggagagagcgaagggtgtggatattcagattgcaggggagtcaatgccagcacatttgattatcagccctgtagagttgtatgatgttattttgggaatggattggttggatcattacagagtacatcttgactgccaccatgggagagtttcttttgagcggccagagggaaggttggtttatcagggagtgagacctacctcagggagtctcgtcatctcagcagtgcaggcagagaaaatgatcgagaagggatgcgaggcttacctggtgatgatatctatgccggagtctgtggggcaggtagcagtgagctcgggttattcaggagttcgaggatgtgtttcaatcgttgcaggaattaccaccatcacggtctgatcctttcacgattgagttggaaccagggacagcgccgttgtctaaggcaccctacaggatggttcctgtagagatggcagagctaaagaagcagctagaggatttgttgggtaagggattcattcgtctgaatacttcaccttggagaacgtcggtgttatttgtgaagaagaaggacgggagtttccgcttatgtattgactaccgggagttgaaccgggtcactgtgaagaacaagtaccctttgccaaggatcgatgagttgttggatcagttgaggggtgctacttgtttctccaaaatcgatttgacgtcgggttatcaccagatcccgatagcggaggcagatgttcgcaagactgctttcaggacgagatatggacattttgagttcgtggtgatgcctttcgggttgactaatgcacctgcagcgttcatgaggttgatgaacagcgtgttccaggagtttttggatgagtttgtgatcatctttattgatgacattctggtgtattctaagagtcctgaggagcatgatgtacatctgaggagagtgatggagaagctgcgggaggagaagttgttcgctaaattgagtaagtgcagtttctggcagagaaagatgggttttctgggtcacattgtttctgtagagggagtttcagtggatccagagaagattgaggctatcagagattggcctagaccgacgaatgccactgagatcaggagttttcttgggttggcagggtattacaggaggttcgtcaaggggtttgcgagtatggcacaaccgatgactaagctgacggggaaggatgttccttttgtgtggtcaccggagtgcgaggagggtttcgtgagcctgttgacgagtacaccagtgttagcattgccagagcatggagagccttacatggtgtatactgatgcctcgggagttggtttgggttgtgttctaatgcagcgtgggaaggttattgcctatgcatcacggcagttgaggaagcatgagggcaactatcctactcacgatttggagatggctgcagtaatctttgccttgaaaatttggaggtcttatctttatggcgggaaagtgcaggtgttcacggatcataagagtttgaagtatatcttcactcagccagagctgaacttgaggcagaggcgctggatggagttggtggctgattatgatctggagatagcttaccatcctagtaaggctaatatggttgcagacgcgttgagctgtaagctcgtgggcgcggctccagggcagagtgttgaggccttggtgagtgagattggtgctttgcggttgtgtgctgtggcacgagagccattgggattggaagctgtggatcgagcagatcttctgactagagttcggttggctcaggagaaggatgaggggttgattgcggcttctaaggcagagggctctgagtatcagtttgcagctaatgggactatccttgtgcatgggcgagtttgtgtgcctaaggatgaggagttgcgacgggagatcttgagtgaggctcatgcgagcatgttttccattcatccaggagcgactaagatgtaccgagacctcaagcggtactatcagtgggtcgggatgaagagggatgtagctaattgggttgcagagtgcgatgtttgccagttagttaaggctgagcatcaggtgccaggtagcatgttgcagagtttacccattcctgactggaagtgggattttatcacgatggattttgtggttgggttgcctgtgtcgcgaaccaaagatgctatttgggtgatcgtggaccgtctgactaagtcagcatattttctggccatcagaaaaaccgatggagcgacggtgttggctaagaaatatgtgagcgagatcgtgaagttgcatggagtacctgtgagtattgtgtcagacagggatttcaagtttacttctgcattttggagagcctttcaggcagagatggatactaaggtgcagatgagcacggcttatcatccacagacagatgggcaatctgagaggactattcagacgcttgaggatatgttgcggatgtgtgtcttggattggggaggtcattgggcggatcacttgagtctggtagagtttgcttataacaatagctatcaggcgagtattgggatggctccttttgaagcgttgtacgggaggccatgcaggacaccgttatgctggacccaagtggggagaggagcatatatggtgcagattatgttcaggagaccacggagaggatccgggttcttaagctgaacatgaaggaagctcaggatcgacatcggagttatgctgacaagaggaagagagagctcgagtttgaggttggggacggagtgtatcttaagatggccatgttgcgaggtccgaacaggtctatctcagagattaagttgagtccgaggtacataggtccgttcaggattgttgagagggtgggaccagtggcatacaggttagagttgcctgatgttatgcgtgcgtttcgcaaggtctttcatgtgtcgatgctgaggaagtgtcttcacaaggatgatgaggtgttggctaagattccagaggatcttcagcccaacatgactttggaggcgagactagtgagggttctcgagaggaggatcaaggaacttcggcggaagaagattcctttgatcaaagtcctgtgggactgcgatggtgtgacagaggagacttgggagccagaggcgaggatgaaggcaaggttcaagaagtggttcgagaagcaggttgcagcatgagtttgcctttccttggtttccagtttcagtgttgttgagtttttgagcttttgagttgttgttcttatttctttttcatttgtattttcgtttggagttgtaacgatcatgacagttgatgattaataagatgagtatttttttttcttggatttgacttgagttgtcttatttaagaatatgttatgcggtttccaaaaatggaaagtttcctagaaaggacttgtttatttttggaaagtttgagtaaacaacctaagagaaacgtgtgtttacgagatggccgggagttggtcataaggatattctcgaggggatatgatggatggtgaggcatagaggtgtcttacgcgaatccatgagagagtctggagatatgctcggaagcgtttagtattgttgctcgagggacatgaaggtcccaacgactcgtgaggagcggggtatgctcctgaggtaccggtaactcgagggacatggtgtctttagagtacgaggggtacggtggcttcgggtgatgatccgagagcacgctttagaaggacgacccgagagcgagttttgtggtattattttctccaagtgtcgtaactcgatgactttgtggctgagagtgagccgacacaactcagggtttgactttgagtggggaagataatatgtgtgatacccgagataccgtagccgaggcctgagagtgacggtttatgctcgaagattgcggtctgagagtggatagtgagttgtgagcaacaatgactagtaaatcgtgagtatatcgactggatagagagacctagagggggtctggttggagggagtgcggactgtagtgatggttgcacggagttcctcagagtggaagggtgaagctagattcgaggacgaatctatgttagtgggggagaattgtaacgcccgtgaaccggaaaatcggttagggtttgtttttaaatcatccggtttaattggttgggttaattggaaaccgtagagtgtgcctataaaagaagaaaactcgaaattagggctttggttagccacttttcgttttataaaggagaaaaagagagaaaaggagaaggagcagaatcgttagggtttgggataaatcagtttcgtcatatcaaatcgtggtaaaagggttttggtagagttattcccaagtcctttatcgttattctacagtttacagaattgaatttggattaaaattggttgagttattcgcagtttcgtgagacacgttttctcagacgcgaattaggaccagcggagattgaaactgatatcgtggtctcgtctgttttccgatcggcacgagattttgtgggcagctttgtgacgtctgcggctaggatttcaccgtagcgattgaatagttaacggttagtttgtattttagtgtttcgtctttgagactgcttgtttctggtttttcctgtccagtttgcttcagggttgcttttggtgtggacttgttgtaggacgtttctggactgtttcagacgcaaggagagtctctcctgggtttaattgctattagaatcaatttgttaaggtgagtgcgtgaccatgagcttatctgagcgattgggttgtgtgtttgttttgtgtgatgatatgtaggtgtggtgaatgtgttttgggtgaattgttcaatgactggtttgttgtattgtattcgtgattatacctttttatttgcttgtgtgtatagctcgtagatgggaggatcgcttcactaagtatttatgataatacttacgcatctcattgtgttgttgatacaggtaaagataaagtgtgatcgtggaatcatggcaaggaagagaggatgatctaggaactcgtttgttttatgtttggtgtttttggttattggaacccggttaggattgtcagttattcttggttttgttgatcgatttatttatttattcataaaatagtatttctgacttgcggtttaattattatgttattggttggtttaattagatatttatgggaatatttaattatatttttttttttaaatgggtcgggttgtttcaatttgaaaactaatgctttgtaaatacatcatttctaaaattaatcataacaagtcttactttttcttttctaactatgatctatatctttatccttttttttattgtatttatttttttattttgtaatatcttcttcatcttcataatttgcacaaaaaaaaagttagggatgaaaaacaaacctgagctccaagctaatgcagagtagaaaaagatcgtgccattttgtttttttgattgtttgttcttcaagtacataccttataaggatttctttatatattagaacccctaacacttaaataggtaaaaaagaaggttggtatatcacgttttttttgttgctgattatcatttcattttttttatttatttaaaaaaaaaagcacctcaaacactccacacaacatgtagttttactgttcaaggcatttcaatcttctttcttcacaaaatttgactctcttatacaataagtatgaattttcttttcttattatttaattggactgtctttttgtaccaccttttattagatgaatggtaacaaaaccacagttgacccacactgcggcggttgagccatcctaaattccactcaccattcacaacctatatagtaatgcaaacgtatatgtccacatcagtccacgtataaaaacgcacaacatcagctatatatgtatatctacgtataaataacacaatgcagaattttattatcatgttcttataattgaaattacaaacaaagctaaagtagtttaccttacaattagagaaaacttgggtaataatgtggaattaaagaattatgtgtttggagttttttttttttttgacagcggagttaaatcgatttgtttatataatatgacaaatatgaagtgataaactttagaacattttttgataatatcatgttagattttaatatttaaaatatataaattgtctttatcttaaaatagttaaaaataataattaagattttaaattaagttttttttccaaaaattcgtatttaattttagtttattaaaaatacagattctgttttaaatctagacagaattgtcatttaagatatttaaaattgtatttaattaaaaatagggtagagtgtctttttcaaacagaaactcaaaaataggacaattttcaaaatcaccctttattcaattggtttatagattttggttaaactcaaattaacattggtttagagatttaacttggtttgatttaattttacaaaaattgatgggtttaaatggataaaccattgactcattacaacccaactcatttcattcataaaaccatttgacccaataactcatttgatcaatcaacccatttgagtcaaaaatttcaacccatcagagttcatgaattgaattaagttaagatgagttgacccatgaatcttaacctattctgacacccctataatcaataatctttctaaaattaattacaaatagaatacatttattgagtttaaaaaaaacatttttttttttgatgtagtaaaaatattaaaattgaactctataaagaattaatatatattgaaaaaataatactagagccatattatactaaatattttacatataatatatatgtttatattggtaaatttatataattattaatatataatattgatgggactatattttatatatgatttttgaaaaagttattattttattaattcatcgattaatattattttttatagtagtttcaatttaaaactagaataatttattaatttataagtttttaccgtacatatacatatggctctgactggtagtgtttgatagaagaaaaaaaagagtaataataaaaaaaaatcttcttaaatacattgacttgtcaccagtcagatagaaaacacaaaacagtaaaaaggagaaaaaaaaattccaatacgtaaatcgaactcatatcattcttctaactaggcctgggtttacggcaaacaccgttcaaaccgaactgatcaaaccgaaacattcggttatcggcgctgacatttaagaaaggagtaaaccggtcggcaaacttaatttgagatttcggttaacggttcggtacggttcggcagacactaaccgatcggtttattcggtttaaaggggaacacatataaaagccaaaaaaccctagatctaagtcattattctcccttcaaaaaaaaaaaaaaaaggctactcttcttcttctcaagatttttttcccctctttcctgtttcttcctcttctttgaccttctccctcttctcccgtctgttttcttcgatcatttcttattatattcttctccaccgccgcgacatcgattctccttgattctcccttgcgtcgatccaccttttctctacgccgttttcactctccggtgtcgtcaacacttcttaactccattcccgtctttacaaattttagttcatcaaatccgaatgagttgtttggcttcatgaatcacggcttggactgctttttcaactctcaagcttttctcatccacgatctcctctacaatcttaatttctcaagtggaccttgattaatgatttgatttaggtccaaaaataatacttttgggttttctattttgtacttttaagcctataataaattttggttaccctaataaaacccgaataacccggaataaatttaattcggttaaagttcggaatcaattttaaagcttagaaccgacccaaataacccgtgtaccgaccgacccgaaccgagatttatttcggtgagattcggtgaaattttttgtaaaccgaattttcccaaaaccgattaacccgacatgaccgaactccaaggcctacttctaaccaaatacaagtggtacattatcatctagattaatgacacattttccaatgcaatataatcaattttaatcatttatatgaaacaagtggggagagaaaacgtgattttattttgctatatagaggaatgatttcttctatagtttatacaatcaacacaatcaaccaaattttctatccctacaaaacaataagctctagaagtattttttgttttcgtaattttttttcaatctaatatttcattccaagaattagcataactcaatcttgaaggtattttttaattcctgtatatcacatgtattattaatttaaatttatggtatatttaatatctacaatttcttttaactagttgtttttctagcattaaattaaggagttttttgttataatattagtacttattttgaatgagtcagattatatattttgtaaaggttaatttagttttatataattattaattttattggtgttatatatatttttatatattaaaaacgttcgatgcaaacaaaaatgaaatggaaaactagtttggctagaatatttttcgatggtttatagtttaagtagtataatttctatagtatggaaacattcaaataattttgaagtataatttgtttaagtaatggatttacatcttaataattttatgatatattatgaagatgactggcaggtcagataatacacgtagtagaggttgtcgtggaactatcggtagaggacgatcgattcgtgaaaatgctggtgaaggaacatcgagtagaggtgcaagcaatacaagatgcaatgtatgtttattaaagttttgtgtatactattttatagttttacctacatattatttttaaaatataattgtgattgtttaaaatttgaaaatgtggttagcataaatggacgcctggaacaacttaaatttttctagagcttgtaatcgctgaattagaagcggaagactatacgattaggataccattagctgctggtaaacggagaatcgaagaaacatttgttgaactaactggtgattcggttaaatgggaccctgagatgaaaagcaaatttaactatttgaaaaaatagtggtttttcaacaacatattatctaagggtagtggtacacatgttgaattatcggggcagatcataatagaaccgtcatggtgggacaatcgatgcacgataataatataattttaattatgtttaacatatagtttcttgtaaacatgttaatcgcatactcataaatcatatttattttacaggaatttggtgaaaccaacaaaaatatatataactgtgctacaaaataagcctcttcctttcaaagatttactagatgttatacatagcaaacatgatcttgagcaagattttcgctattcaccccacacacttggagttcagcttgatctcgaacaagaaccatatgatgatgatggtgtgccagcagatgacatagaagaacatggtcaaacagcacctccctttgagaattctaatctaagagcatatgatgatgatttaccacgactctctcggtcaactgatagttagtttttttttagcttaactatgtgctgaagtgtggtgtgttcagttcaattccccttaaacactaacatgtcgatgcagctatagggggtgtcaatccagtccactgttattgctagcaatcaagatgtgtatagaaacaactaagtcaagccagattataatgatggtgggtttctagtaacaatcctaaatcaagatccgaataacagaaatgagaacttaagagccctactcgatcattgggtcgagtagaaccaacatgcaacaaatttacgaactaaaatgcaataaaaggtgacacagataacaggtgaataaaagtgcaatcaaggggtgaatacaaataaatctaagaagaatagaagtcctaaggatgattcattgataagggcaactctagggttcatcaggtggctaacatgcgaaaagcagataccctagacgatagattcaaaaatcgggtcaatccactctcgggacagagaccctcataactctaccacttcctaatctcaactctcgttgatgaaacatagcagaacagggtttaagcaacaatctacaaaattcaataagcagtctaaacatccaatctcttgggctagaatctacaaatctctggaattcgtagatcaggcatccatttgaacgtcttttcgacgttggatacctatggtcgaatttccacattagccagcaaaaaccgcatgggggctaacgaatacagaaggaatctaacctaatcttaaccaccagactaacttagagattaccgtaatctaatccattctcaacaaccctaattactactcaagcaacatactcaagaacataaacccagaaattactaaaatcatatcaaaatgtagatctaaacaagataaacaactttgctcaaagaactaaatgcaaaaacgaaatagattaagagtaattaaggtttcaagattctaaaacacaaagaaaaactaagagataaaagcttggtcctttggacaaatcccaaagtgacctatttatactaatgtctcaaaaaccctagattcactagaagacaagagacttgaggcggtttggatagatgttcgatcttggagatcgagtaaagagggtgctgcaaagtctgcgcatttgcctccatgctccaagtgatcaattggtcgagtaaatgcttcttcctctcctatctgtatgctcagatgtctggttgagtggggaatgaggaggatcagaagacgctttgaacgatcaacaagtcttgtagagtaggttgcccttgatcaagtaaactggtcgagtagaggatcgagtaaggggtcgagtagagtatgttgcctcgtctatagctacctggatcgagtaaaggggtcgagtgaattgctctgctgcttccctcttggtttgatagagtagagggtcgagtagatttccttgtgagctccttctgcacctgaaaacacaccaaaacatgcaatatatatgtaagatgatcctaaatgcctaagtgtgcaaaataagctaaatgtgatgcaaaatgatatgatacaatgagtgatcactaagctaaatgatgataaatacatgcctaaaatgagtaaaatacagtgttatcatcaactatagagacaactcgacatgctccacacacaacgcatgggacggcttcacgtgctcaaaatacttcgacacgacgtactcatatgagaagagcaaattttgaggcacgaattgatggaagctttcaacgtacggaagaatctcgtagtgagattgatgactctcctacgtctgtaggttctagttctgctaatgctccggaaatgataaacttttttaataggccaagtgaaaaagatgggaagaagtagtgattatttgtattaaaaaattttaaataagaattaagtttttctctcatgtatattttatatgttcattaaaatattttcatcaatgtctaatacaaatttacttgaaatatcaggaacgaattgtcgagttgcgttcatttggaatcgagaatcttgacgacgaagagattgcagagttaatgttactagaagaagaagcgaatatggaagaatgcatagctcgtatgttgcaatattacacgagatgattttacaaacaacctatgacatcatatgggggaagaggatggctaattgttcgagatcaaatttacagtaatgaagtttcatgtcagacacttatccgaatgagttcagaggcattcacacagttatgtgaaatattacatgggaagtatggtttacaaagctcgacgaacataagcctcgacgagagtgttgcaatctttctaatcatttgtgcctcaaatgatacacaacgtgatattgcattaaggtttggacatgcccaagagacaatttggcgaaagtttcatgatgtgcttaaagcaatggaacgattggctgtagagtatatacgcccaagaaaagtcgaagaacttagagctatctctaatcgtttgcaagatgatacaagatattggccatttttaatggatttattggtgcacttgatggaacacatgtacctgttatggtgacaccaaggcgagaaggtcttcgatttataaactgaaagggaattgcaagcttcaatgttctagctatatgcgatcttgacatgcttttcacatattgttttgtcgggatggcaggatctacccatgatgcacgtgtcctttcggctgcgataagtgatgatccactatttcatgtacctccagatagtaagtattatcttgtagattctggatatgctaataaacgtggatatttagctccataccgaagagaacatagagaggcacaagatatcatctccaataattttttaacggtgaacctcttcgaaacagtaaagaaatgtataataggtggcatgtgtcattacgttctgttattgaacgaacgttcggcttatggaaaaaaaaatggagggtcctaaatgaatttccgagatatgatattactacaaaaagaagtgttacattcgctacaatggatctgcataattttattcgtcagcataatattaaagactatgattttgacaatgttgattctgagaataatgttgtacaagctccacatgatgcgacagatgagcaagataacaatgatggtattgaaattgaagaatcatcagaggcagaaatgtatatgcggatagttcgtgatcaaattgctgaacacatatggtcagtaaaaggatatggatctcgacgttgtcgataaaatttatattatatttatcataaattttttttatatttaattgaataatggaatctttaaaattgaaacacataataattctataattttaatttaatttttaaaataatttgaattttatttataaatttaaaataataacctaattaaaacgtttaacaattcttctcgatcagtcttattaaccaccagtcaaataaaaacaactaattttctcttttcttctcaattcttcttacactcaccaatctctatcagagagggtaatttcgtaatattataatataaataaacttataacaacacttacctcaaatcaaatcactatcgtgtcttctcttttccccaaccctaaaaaaacgttcacgccggagaaacaaacccttcaccgtcttcttcgccgttcttcaccatatcgccggcgattagtccctcacattctcacaggtaaagcttctcattctaatcaaatccttctccactcccttcagattcgcttaaacaagctctcaaatccctaatccttttcgtttctccattctagatctaaactatatggcgatttccaaagatctctatccttctcaagaggatctactctatgaggaagagcttcttcgaaaccaattcagcttaaagctatggtggagatacctaatcgcaaaagctgaatctccttttaagaaacgcttcatcatctacgagagagctttaaaagcacttcctggaagctataaactgtggtacgcttatcttagagaacgactcgatatcgttaggaatttgcctgttactcatccacagtacgattctctcaacaatacttttgagagaggtcttgttactatgcataagatgcctaggatttgggttatgtatcttcagactcttacggttcagcaattgattactcggactcggcgaactttcgaccgtgcgctttgtgctttacctgttactcaacatgataggatttgggaaccgtatcttgtgtttgtgagtcaaaatgggattcctattgagacttcacttagggtttatagaaggtatcttatgtatgatcctagtcatattgaggagtttattgagtttcttgtcaagtctgagcgttggcaagaatctgcagagagattagcttctgtgttgaatgatgataagttttattctattaaagggaagactaagcataaactgtggttggagttgtgtgagcttcttgtgcatcatgctaatgtgatttcgggtcttaatgttgatgctattataagaggaggtattaggaagtttacggatgaagttggaatgctgtggacttctcttgcggattattacattaggaagaatttgttggagaaagctagggatatttatgaggagggtatgatgaaggtagtaactgtaagggattttagtgtgatatttgacgtttattcacggttcgaggagagtacggtcgcgaagaagatggagatgatgagttcaagtgatgaagaagatgagaatgaagagaatggcgtagaggatgatgaagaggatgttcgccttaattttaatctgtcggtgaaagagttgcagaggaagatactgaatgggttttggttgaatgatgataatgatgttgatctgagattggctcgtttggaagaactgatgaacagaagacctgcactggcaaacagtgtgctccttaggcagaatcctcacaatgttgagcaatggcatcgtagagtcaaaatatttgagggaaacgcagcaaagcagattctcacatacacagaagcagtgaggactgttgatcctatgaaagcagttgggaagcctcacaccttgtgggttgcttttgccaagttgtatgaaaaccacaaagacctggtcaatactagagtgatttttgacaaagcagtccaggtaaactacaaaaccgtagatcatctcgccagtgtgtggtgtgagtgggctgagatggagctgagacacaagaatttcaaaggagcattagagctgatgaggcgtgctacagctgtaccgacagtagaagtcagacggagagttgctgctgatggcaatgaaccagtccagatgaagctgcatagatccttgaggctttggtccttttatgttgatctggaagaaagtctggggacgttagaatcgacaagagctgtctatgagaaaatattggatttgagaatagctacacctcaaattataatgaattatgcttttcttcttgaggaaaataagtactttgaagatgcgttcaaggtgtatgaaagaggtgtcaagatattcaagtatcctcatgtgaaagacatttgggtaacctatcttacaaagtttgtcaagagatacgggaagacaaagctggagcgggcaagagagttgtttgagcatgctgtttcaatggtaagctcatctgtccttttacccatacttttgtgctgtctgattacagatccgatgaaactagcaccgaagttgactaattggccagtggcttagagaacttgtttattgatgtgataatattgaaatgtgatctaacttgttttttgtctctcttgcaggccccatctgatgctgtcaggacgttataccttcagtatgctaagctagaagaggattatggtctggctaaacgagccatgaaggtttatgaggaagccaccaaaaaagttccagaaggtcagaagcttgagatgtacgagatatacatttcccgagcagcggagatatttggtgttcccagaacaagggaaatatatgaacaagcaattgaatctgggcttccacataaggatgtgaagatcatgtgcataaaatttgctgagctggagagaagcttgggagagattgatcgtgctcgtgcactctataagtattcctcccagtttgcagatccaaggtccgaccctgaattctggaacaaatggcatgagttcgaggtccagcacgggaacgaagatacctacagagaaatgctccgtatcaagcgaagtgtttccgcaagctatagtcaggtctgcatcagtttctcttctttcaattttttgtcatttgtttttggagtcgaaatctgactatattgatcttttttgtttcagactcatttcattctaccagagaacatgatgcaaaaggacaagctgcttgatgtggaagacgcaaaaggcgagctgaagagagccggtttacctgaagacgaaatggcggctctggagaggcagcttttgtctacaactacccccacagagccagcaaaagatggcgggagaagagttgggtttgtaagcgcaggagtcatctcacagtccggtgagaatgaggggaaaccagtgacagggaatggagaagacatcgagcttcccgatgaaagtgatgatgagtctgatggagatgaccatgtggagatctctcagaaagaagtccctgccgctgtttttggaggacttgctagaaagagagacgaagacggcgaagaagctggagaagacggtgctgcccagaaattgggtgcacttgagaggatcaagagacagaagcttaatcagtgaacaagcgagtcgtagacaattagtcttgtgcttagtgattctggaaccaaacttcattgtaatacccagaaacgtgaaacttagagaaaaattttgtattctgttttgttttataattcgacactttgtttacataagagttctctgtatttctttggtctttggtcttaactagagttaatttgtttgtgcaagttctttgcttcttctactcgaaagagccttctagattcatcaaacacaaattaatttatacttttcattggaaggctattttgtttcctccagacaataatatttgatctaaactcttcatgacataaaattgttgtagctacaaggaaaagcaaacactgaagtctctcatcttcatacattctcctttgagcttgaagaaacctcagtttttttctcctcttctttgttactcgttgctacctgagatgattctgcaacagactcttcgggttctgtcttaagctcagactcgaactcttttgcagcctgcgttataccaaaccatacaaagcttcatcaatacaagtaaaacgataataggaacacagaaaaacatacaacaaacagacaaccatgagagccataacaataaccagaagttttctcggagctaatatcactccaataataaaatcacgagctacctctgtgatcggtttttgaatagagattgcattgccagattaacctaacataacaacatgcttggtctatactatatagcaaaattttattattgatttaacataacataacataacaacaagcttgatcgacatttcatgaatgaacttactgttacaagcaaataaaatgttttattcttgatctatatactctataaggtaaagttgtccccactcagtaactaatctttctgagtgttcttatcagttcctcacaaatccacaaaaagtatacacattcattttacatcaatcccaactacaactaacaagctattcacatgaattgaataaatttccccgtttgagctaacataacatgctttgatttataatacacagcaaagttatcaatgaaacttaatgtttacaagcaaatgaatgatttattcttcatctacggtcatacagcaaagttatataaaccactcagtttccaagtttttcttagtattcttatcaattccttacaaatctaaacataaactcatagaaaaactaagcacctgaaacatgaagtttcctcattttgaccttttacatcaattccaacaacaatcaacaagctattcacatgacttggcataagaagattatcacatccatattctatcaaatttgttatgatcctatacagcaaagtttacaagcagatgttctatatagcaaagttatataaccactcaattccacacaaatccaaacataactaagcatctgaaacagaaaggtcccaaaatcacatttcttcttaccacaagaatctccagaattgcacaattttttgaaacttgttatcaattcctcacaaatccagacacaactcatacaataacaaagcagaactcaaagaatttcataaagatcccaacaaaatttctatgtagcaaacctgttgaaagctcttgacggttttgccaatactcttgccaatctcaggaagtttcttaggtccaaaaagcaacgcagcgacgccagcaatcacagcaagctcaggcacaccgagaccaaacaaagcattacaagtcagtggctttctcgttggttcttgtcggattctgcgtccaatcgctaccagagaacgagtgtttggtcgggtcgtgactgtgaagcaattggagaagaaggaagagcgagatgatgagaggagaggtagagatactggtggtggagaagatagagtcgcaacagatgtcgccattgctgctacttttttttttttttctggttctaaatgttatctgtgttttctttttcttggttttacccaatataatccattaaataaaataatatttgttttaggcttttagctgggtttcaaatgaaaaattgatattctgtcacatttatctaatatagttttcatttaattttatataaaaactcataataaattattaaaaaatcttatgcctttaaaaaatttacaagatccaaccgcaaatctgcggataggactggatccaacctagttctaatgggctttcccctaaaaccgaattatttaccctaattattaatatgaacttccgtcattttcgaaatcctaaactgacgaacgacgatttcgatcgaaatcctttctcgccgagcaaatctccatcgccatcgccgaatctttccaaatctccatcgccggatctctctcctctctgcttcttcaccacccgccgttacaatccgccgttaccgccgccgttccaaatctccatcgccgaatttttcctattgtttgtaagtaccgaatcagcgttttgttttgaatgtgaaccctaatttcttttgtaatcaaaatttggttttccggttgttgttttgcaagggaattatggtttgtgcaaagttagtggatccttcaagttcgagtgagagtgaagatgagaagattcgtgatgacatgatccgtgaagctgatgtgaaccgaaaagaaatggaagaagaagtcgtgaagaagaggaagaggaaaaaagagtggaagaagaaaaccgtgacgaagagcatcagggaaacctaaacgaacgggaagaagaaaaatatgaggtatatacaaatatctgaaaattttgtctgaatattgaaattagtgtatagggacaactagaaaacaattagtacaactttatagtataggtttgtgtgattagtgcatggatttatacgttaacgtgatccatcatatattggtttgcattacaaaattttattatgagaaaagttgataatgttgggctgagataactagtacaagtagtacaacaaaatattaagtttatgtttgtgtatgaatttttatgaaattgatgatgaggaacaaccaatgcaaccacaaaggatgttctttggtccaagtgaataccagaagatgtgtaaggtagggacgagatgtattgtgcatcatacagtgaagtatttggaggagtttgaagaagatttgtcatggttcaaagcgcattcacagtttaggcatgtattccacatgcctaaggaaaaaaaccacatgactcaaggcatgtgtatgcttttgctgcgcacggcacagacagagatggatagagagtgctggtttgtggtgaatggagtgcctattaggtagtccattaaagagcatgcgctcttaagtggttttgagtgtcatgagtacaaccaatgcaaccacaagggatgttctttggtccaagtgaataccagaagacgtgtaaggtatggacgagatgtactgtgcatcagacagtgaattatatggaggagtttgaagaagatttgccatggttcaaggtgcatgcacaatttaggcatgtattccacatgcctaaggagaaaaaccacataactcaaggcatgtggatgcttttgctgcgcacggcacggacagagatggatagagagtgctggtttgtggtgaatagagtgcctattaggtactctattaaagagcatgccctcttaaatggttttgagtgtcatgagtactccagtgagttgtagcccaatatgatcagcaaggatgaagaattaaagtttgcataaaagatgtttaaaaatatatttgggattaaaatcatagatgttggaaagaagctgaatgagatgaaggattgtggagaaagagagaaggtggatagaaagaagttggatatcttgctatttttatgcaaggtgattgttgcgaagtcaaaggatgatggtaatattgatcgtttcttacagaaaattgttgatgatgtgcatgcatgcgagacatttccttggggtcgtttcacatttgatgggtgcatggaagggattaaggtgataatgaacaacatgaaaggaaaagcaaaagtgcaaacatgtttcccggatttattcttcctttagaggtaacaatttatagtattctttgattctcatgcattattagacttaacctaaaattgatgtgatttttacattgaatgtgtagattttggcatttgaggctatcccacagttgggacaaaatttagagaacctgtaaggttcgagaatgagtgtcgaagaatgtgtaagagtaaattctgtagtagtgtcatgaacattggaagagataaacgatgtgcttgaaagtgtaaaggtaaggttgtgaattataagttattatatgattatgagcttgaatataattattttaatgtttgaatttttataggatatctctagcatcgtagaatatgatgttgttgatgagaaaataggttttattgatctggttgttgatagttggagaacccgtctaatcaaagagaagaagaaaatctggtggaaagacatgtttgaccatgatgtgcgttctcgaagcgaccagcaaatggaggagcaacatatctcagagaatgttcctcatgttctggacattagctctttaaaagaagcaattgatgcagactttaaacgagtatggagatgttgagagaacacaatcagaggcttctaaccattgaaaggagacaagatggtgagaatgtgccaccatttcaggagaaagtgaatgttgatgtgaatgtggagaaagatgttggtgagaatgtgccaccatttgaggagaatgatgttggtgataatgtgccaccatatgaggagaatgtgaatgtggagaaggatgttggtgagaatgtcccaccatttgaggagaacgtgaatgtggatgatatgactgagggtgtagagactgagggtgttgagactaagggtgttgaaactgaggatgttggcaagtgtagtggaaacatgcactgacttggttctttttgttggaggagcatcaaaaggtatgttggcaagtgtaaaggttttgtcaatctttgatcgtgtttaatatttgatgtgtgttggttacaatggttctgatttactgttgaacaaggtacaaatgatgagactgaagcgactgaaggcgatgatgtgacgccgaaaaaggaaaacaagaagaaagagaagaagaggaaagggtagtgcaacgatcagaataatgagaagaagagaagagatgaggatggcaaaaaacgtgataaaaacgtaaagtaaacccatcgagccatctcaagccactttataccgctgagaggatgcgaggcactaaggggcatgtttatgtttggggaaaaatgtactgaacaagtacaaatgactacatcaccaatacaattgacttcaaaacaagtacaaatgacttcaaaacttatttttgaaaaaggaattcaacatagtttcaaattttaacatacttgttacaaaaggaaatacaatcgatagaaaatgattcaattcccattttacttctttccaagtgcatccatcagctgtacgatctctacatctttcttgtccaagcggtccttgagcttctcaatttcagcacaaaattggtgaatggctccacgattactatcacctccaaattttaatgcgttttggatcaattgcatgtgatcgccaagtcgtttgtcaatgcaaaagcactactcgtgaactgcgagatcccaccacttgtctatgtgatcttgaccactcattggacatttgagaaatgtcttcttttgattgtcaatgatacgctcttcaaggtcaagatgtttgccacaaaaacagtttgtgggaacaccatattcaccattgtacttgcaaagatcatcaaattcaggtcgttcctctgatgaagaaggtgacgaataactaagcggcattatttgctgtagccagacacatgaaatcaaaaggagataaaatccaaaatccaaaccctaaatctataagaaaatccaaaatccaaactctagagattatcaaactatcataaacggcaaccctaattccatttcaaaccataattcgatgcaaaaggggaaaaaatcaaacccataattccatttcaaaccctaaacccaaaccataattaatcaaattaaaacccgaaacttacctctggtgcttaaatggatgtcagagaatttggatccggcagcggatgcggaatattcggtggcgtaggcggaggtttgtcgggagtgttcttcggccgataaagagagaagttaacaaaatgaaagaaaaagagagaagaaagagagagaagaaagaaagagagaagaaagagagaatcgaaatacagaaatacaaaaggaaaaataaaaggaaatacaaaagaaaatacagaaataaaagagttattaccaaaaacgtggaatgcgtggaaaacgtgttgtgggccccaacaaaagactagttgtcccataagttatttagttgtccgcttgtcaacatatttctacttattcgaagttttagtatttagacatatgatataatatattataagtcaacatattataagttaataaatgtccttaacttatagttggacatatgatataatatatttaataataagatataatattttagttatttaattcttatgaattcgtgcgtttcgtcttgttcatgccaagtttgtccaacatgatataatgcataccatataatggaagaagtgttttctgaattgatgtgtataatatctttaaatttttttgaaaattagtataagtgattaataaatgttccaaaacatgtatgactgattcttctttagaaaaacaattcccttaaaacagaaacaaatgattctaaaacaagtacaagtacataaattcccttagcaccagtggcggacccattaaaagagaaggtgggttagttgacacaagttaaaactataaattcaatttaatgcatcaaatatgtcaaagagaaagtagctcggttggtaaattttgtgtcattgacacctcataacccgagttcaaacctcctccatgtcacttattagtaatttttttactttttatatgttcaaaaaacaatatatgaaccaggtaaaaatgttttctgggtccgccactgcttagcacaagtataacacaaaatacactagtacagacggtacaaatacacggtaaagacataacaacataacacaaaattacaaagtacttaaaatcaagacataatacatcaaagcaaaatacacattaaattcgggaatcagactctcgggttgcaacaacgcattgatattaatcccaagctgaaacttattattagtgttctttcgacgacgttctccgattgatggaaactgggtttcttgatttctccccggtttaattgtgttttccggcggtaagacgcacaattgttttatctcatttagaataatccaaactgatgaatgcgagactaaatcgatggttctgtggtatgccattatccacgtattcatatggtaatcatgcgaagttaggtcttccatttcgatactctctgttctccatttggtctccataaagttttgggcagcggtaatcgtatgtacacacggatacttgtctacatcaaaacgtccgcaagaacaagttttccttagcaagtttactgaataagacataccaccttctccaataacgatgtattgacgttcgaaactgttaaactcggtcaccatcatcgttttcgcaattgggcataaggtgtgaatttcattctccacaaggcacaagaccccttgtttcagattatttagatgactccttcctatgtctgttaacccattctgaatttttttcaattatcacatcaagcataggtaaaaggaagtattttcttgcacgcctaaatgtattgttcaatgattcacacgcattgctcgtgtctatgttgtacttctccccttcaaaatagcatctcgcccaatttttcaaaggagcccattcatacaaatacactccgagattaggaaatcttctcctaaatttagcatactctctactgaacttaaactgagtataaacatgtgcggatgcgctgaatttagccaccgcttcttcattctcatttttcacctttactttcacgttttgagacaaatgtcaaacacaatagccatgtctcgcgtttggaaacacctgcataactaacttgatgatgctttgatgtctatttctcataaaaaccaaacttggttcatccggtataatggttttcagcttgttaaaaaaccaggaccaactcgcatcgttctccctatcaattacagtaaacacaatgatataattgtgatgattaggatcttgggctgttgtgaaaactagctgaccgccgtaaacggtcttaagaaaagtcgcatccacaataacaatcttcctcttagctttaaacccttcaatggaagcaagcacccaaagcaacgaataagtacttgaacttttgttgtgcatccacttccacatatgatattgtcctaggattcacctcctactttaacatgtacagataagagtacaagtcaatgtagcttttttcaggactaccacgcacatcactaatgtgttgtttttttcctttccatgcggtagcatacgaacaatgcaaacccattcttccccaaacaatactcattatgcttttaggtggtggagtttgaaactcacctgaataatcctcatgcaaaacagacacaattaatcgtggtgtgccggtatgtttacaattgcttgaactcttatcagcccgcttgcatatatgcatcttcctgtgaactctaacactgaaagaatttgagctctttacttttgcaagtcgtaaataccatttacaacctgttgttgtagattgtcggcatcgtaacaagagttgctttgactttatagttgcggtcgcaaaacaatacttatttgcagctttgttaaccaaatcttgcattgcctccttagaaacaaatttttgatgtatttcaatccccgtcccatctttccattcctcaacactctcactttctgactactgtgacttctttcaccagcacatgaaagctcataatactcaattctaccatccacaccattatcctcttcactatccatccggctatccacatgctccctattgtcaataactgcattctccatagcctcttctacactattagcctcttcaaaaattcggctatccgcattctccatagcctcttctacacaattagtctcttcaataatcggttcatcattcaccccattacctcctacaatttctcctccaaaaatcgtaactactccaccattatccacatcaaatgcattcaactcctcataattaacaccaactgaacttcttccctctacccttgaaatttgttccaccctctcagattctttatttactacctccacgtgcaaagctggtctaattcccttagcattcactaccattagataccctaaaaagtcatcatcatctacaatagatgtctctctctgagatgtgcatagaatgtaactcaatttcaccttccttgaagtttcatctattgcaatcttcttgcatatattttctactaacaacgagtatgttatctttgacgtctttaacaatataccgcttaaagaattgtttaaaatccactcatgctcttctgaatagtacccatagtcaaattgtatgaatgtgtgcttgttcttcatcgccccctgtaattacaaataaattatttaaacacaaatacataatcatttagatttagacataattgtaccaattgtcctatattatgtctcattaataccatttataccacctgtcctattttatcttaataaaacatttgtaccacctgtactattatgtctcagttttaccatttgtcccagttcgtctatcctgggtttctcaaatcgtgaaattcgattgaacactgaaatctccgattcaaaacgatacaacagcccataatgaacaatacaacaattttatgttattaacaaataactcaaacaagaaattcacattaatctacaaatcaaaaggagatcggatttacttttgccggtgaggaggaagctaactttgagagcagattatcggattggaagctacggcgagcctagaagctaactcgccggtgaaatcggagctcaagtcgccggcgaaatcagagctcaagtcgccgacgaaatcggagaaaataaggaaccggagaactcagaagaaggagacgcgaagcgatggataggaattaaccgtttttttttttttacaaatcgtttattctcaattactcatctaagggtaattgcacacccttgagtggcactctgaataactaggggtacaccagaacgttttttcacttttggtggctaaatagaattgtcctcgacaggtttcaaatctcttctaatttttttttccaaacttttagtaaatatatacaatcatattgcaacatccaacattggataaaccgaggtggagaggcaagagtgagttacaacaaaatgtacaaactgataaccataaatatattacaaactaaagtgtaacaggaaaatggtaacttggtaatagtaaatccatagcaaaactcaataagaccaaacattgaagcttcaagcttgcaattggtcctatcgcatccatcatctgcttactttatggttgcatcttgttccccatcttcaactataacagatttagtagtacaaagtatccaaaaaggcagtgaaagcaaccaagcagtggaagtataccaccgtgttgccaaagtaaaaccggataaagccatagtggcatccaaaaagagttgcaacatcacgcacaaggtagacctggaagaggttcatattttctaataaactgaaagctttatcagtaggatgaaacttgaactttataattaaaagattgataaaaaaaaaatataaacattacgagccagaacataaagcaagtattcttaagtacacgtgtcatcaaacacttcaacccaaacaaaaaaagataacccattgaaggaggaaagccacatgtctacatcttgttcgtaggatgacgataaccagaacgatggtgagcacctcgagaatccgtcggaaaactagtgaaaccattgaaccactagagaaagctatcggagatttcgcatggaagcggacggcaagaacacaacaatggaaaaagtcatgttgacggtaaaaacaagacaacggaaaagttgtgttaacggctaaactgacgatgataccaaacttcggccgatcacaaaatccagcaaactaagctggatggtgatgacttgaagaacctccctctctctaaaaagtattagagagagaagaaagagagaggttggccatctctagcgcatgtgtatcccttctaaattctaatagatgaaaactacagtattttattctttaaaacagtagtttaagatgaaaaaacaaaaacaaaatacatcaaaattactttttttggtttccggcaaagttcggtttgttgcgagcttttgttagcatttgtggctatttctttttagttttttcttctcctttccttttgcagatgtcgttagaggcaaaatctgaggggtaattccaagattctgaatattcatctgcttgatctcgtttctgaggagagtaaatcctcataccgtttagtggacatctaatcggctttggatgttggtttctctttgagcttgtgaatcgtgaaagttggatttcgtgtctggttgagaccaaattagcaaagcgacgtatagcgactaatttgacatctcatcttctcgcggattccagagtttaatagatttgaagattcaaggacatcggttttctaccttttcaaaaacgctgcaaatggatctggtgaaatacggagtaagaagctgaaatctgttggaatcaagtgctgaaaatggtgattttcctcactgaaattcttttgaatctgaccggatttttccatttttggtggcaagtcggttgttttccaccactcctttgtgcaataacacgtgggacgtggctaacacgtgtctcattttaaacctagtcttaatttgatgtattattgtatgggtttagtttggacttatatcatggggttttggatccacaaatttcacctatacttctcttataatttgcccttttgggttagtaatcaaagaaattgtcgacaaaaaaaaatacgtcaaaagtactcctaaattttatataatatacaaaatttctaaatatttcatgaatattaattctacaaaagagcatattaattcttattagagatgttttatccgatctgaaccaaatcaaaataatcgatacgaaaaaacgaacataattgaatatcttaaatcataatttaaaggttactttgaaaaaaaatataaattaataaggtttaattatagttattttatttatatatatatttataatctaattcggatttaaacaaaaattattgatagaaacccgattctaagagccgaaatttgggattaaactcgtaatttctagtttcaataaccaaaattatacgtttgcatcgttgcctcatcaccatttcaatagtttcactaggtgaaattgataaaacttgtaattcttaacagaaattagaaaaactttgtaaatttaacaaaagacatgtacaatgaaaattagaagttcaacacaaacaatcaacgaagaagacaaaaaaaaatttaaataatctgaaaaaacaattctttacaaaaacatacaacattttgtcttaacatatgtcttaagattaatgttacaaatcaagattcttctttaacagctactgatccccaacgcttcgaatacgtttctgcagatgttccaagctctcaactctacgcatcgaagctgttctgttcatcttgcaccctatcaaggccttgcctttgttccccgagctaatgatctctggtgtagtcacttggctgcttgtagtgtctggagaatttgatgtctctgaaggaagagagacagttgaaacaatctgaggcatattgtggaacattgggttaaagccagtgagtctcttcactgtctcttcagccattttcacctgccaaaaacaaacatgcttcaatagcgagttttggtagacagagagataaaagaaagtattttacctttgctcgtagtgtctcaatattggcttttaaaactctgttttctacagatgcatcattgaatgtttgagttacatcagtgagacccttcatgagttttgaattctctacacgaagctgtgaaacctacacgaaatggagattgtcgcacaagtgagctaaacaaagttaaaggagaaagaataagaacgctgcgagagtaacatacttgtgtctctagctcactcaagtgtgcttgctttcttcttctggaccgtctagctgattctctattagagagcatcctataacaaacaaattcacgttcatgttcatgttcaagtccaagaaaggatgtaaatttgttaccttttaacgcgtttaacattagtagggttcatattagtttcaccatcagcttcttcttcatcaccagagagctcagatccacttgttatagcactgctcatcattggtgtagctgcatacagattggtccattagcatttacaagaaatcttgaaaacaaacacaacaactatcaataacatcttaaaaggcttatcatagatgtattgtaaaacctttggaagaagcaagagaggcttgttctgattcattggctccaccattgtcagatctaccagaagtatcctgaggtttgatgaaagttccctatcaaattttcaatattaacaccacaaaatcaattaactaatgcaaattataatctcaaggaagataatggcaaatcatatacaaaaggtccaataagatcttaacactcaaacataacaaaacaagattagtttcttagcttcaagtgaactcatcaaactaacagataaaaaggttttgtttttctttttctatgaaaaaaaaaaaaactcaaacttgagcagagtagtgagtacccttttcatggcgacagcagcacaagcaagattaagtttactcttgagaaatgctctgtattcctctgaatctacaggaacattaggaggagaggagacggaaacaccacacgccgtcgtagattctccgtcgtctgcagcggcggaggattcttgtatgaaacgattgaatgcccattcggaagcactgcgattcaacgacgtcattccattaaccgaccagtgatggttaccggagatttcttcgtcggagaaaactttttccatcttttctcttttgtaatttgtttgtttctttagttttatttatttttttttggtttcaaattgtcaaaacagtttcttcttatccgattgggcagtcttgcattttaataatatgttcttttcaagttttgttgttttgttagatatttaattgtctgattattaccctaatggccccgacaagagtcgtgtatttctatttacagcaaaaacttttgatttattctgttaggtcactgttttcttgtagtatcttaaaaaacgacaggtcataatacaaaaaattataacgatttttattaacaacagaactaataataaataaaaggaaaaaagtatctggaaatatggttttagttatactaatttttctactttttagaacaatttttagtttataagatatatagaatggaaaaaataattaaagtgtcaaacttttttttttctttcttaaaacatgtttttaaaaaaggtgagattcgcctacagttacaacgaataataatattaagatacacaaattaaaatagaaaaaactgatcagagtcaaaaaagaaaattgtatcctagtggacaatggaaaacggagaatctactgcttaacccaccttatctcaatatctttcttcgatctcacaatggccgacacaatgaccgagctacgagaaaaaattgttactatcaccaacgtcctctaccataaagggatttttcgaggtaagggattttactcactcttgagcactcaagataaattccaagattagcggtaaaaatcaaaaataatcgaaaattttaaatttaaaaacgattctttaagaaagaaaaaaccgttagaaacgatgtaatgattgtaatttttcagaccattttataaaaaaaataaataatattattaagaaaacaaaaattattaagattatcagaaatgcagtctccttcacaaacttcattgcctaattgtttactcaaatgtgtaatatatatcgatcttatattccacgtttgaaaggggacgattaggggttcatatttataaacaacaaatgttggtgtataattgataaaaacagaagaatatgaggagcttaaagtaatatttaaaatatacatgtaataatatttgtttatgccttattggatttaataatatttttttcaacgctttttggggcaaatccaagtcagactgacgtggcaaggggtattttagtcaatttaaattttgatctgcatcacaagaatatataaataataaatattatagttgtcgtcggttttgtaacgtaacttcatttcatgggtccatttaatattcccatttgcattttacaaaggaaaggagagatccgagaggaacataatatatagttttgtaagtgaagttagattagagaaatgtactaaacttctgatttttggataagaatctatccaaattcaagttgcatattttggtgggtcctttatttttgcatatattagtacacttgtgcaaaaccttttatcaagagaatatctagtgagagagaaacataacacttgcaaaccaagtggatgttggtggtttgactttgagaatatcagtagttcaactctatttgaaagaatgatttacgttttatcaaagtacgtctctattacaccattagtagaattttgtagacttttctatgttaaagtggtttagaaaaatctcaaactgtataatttcgtgtgacattttgtcttattttaggaagaattattatgtaggttaggttatgaatcaatttctaaatcattcttattttgacctggtgtcatgtttaaggtttattaaaaatccgatgaatggactattcaacggctacactcagagttggtcctaaaacccaaaatattttttgcctataaatatttaaaatatagcaaaatgatgcattggagacttaaacctataacatgagaaacaaaaaaacccggaaaaatcactgtcctacaagaaatttatagttttggtgctttcaaaatgaaatatatattttgaggcttaaaacccttaattgttcagctttagattaggacagacagtggatacatttactttgaaaaagtttgtcgatggtaaaactggaacacccctgattatcagatttttttttttgttgtcttactttcaaaagagtaggtttatctgttcaagaaactatttctacatttttttgtggatttttttcgtgtcgtgtatgggttatttattcgttggtttgtttttctttttccgtataatgctgaaagatttggaaaatagaacattgccaaaaaaaaaagatatgcatgcagctaggccggtgggatcaattagtgggcctaatgaaacgtgttggctcatacatttgggatatatggccccattttttagcaacaaggctcaatagccacatgaaatatttatattttgttcatgtttctaacgaacaaatatttgaatatcattcggaccacattttcttggacagcaatgtttggattgcttaaataatattgagtactaatattcatatttttttgtgtggctgtggtttataacataatgttatagtcaatttcgctcaatttgtttgttaatattttggagttgtaaataactaaatactaaaatagaaagaatttgaaattcttagcagagagagtacaaaagcttactaaaaattgtggtttttaagttaagagtttcgccaacatataaagactaaacttatatgtgaagtaaggaaatggagtttgaacacatacgattaaagctgtcgattgggcaatcacccatggggttgctcagtccaaatacaaataggcgggttttggtccagatcaaaaaacaaatagttcaattagtttaagaccagttttatccgcagatgaaatggggccggccatgtggacattgagcttgcataaactttaataaaaatctagatttttaatttgggagaaaatcaaagatttaaatttaaggaaattttccaaatgtttaaacaagaggagagatcaagaagagagattgagtattatgtgcttcttctctttatcgttcacattgattagagttaaagttttcgtcttcatttttgctacttcgcttcaaagagaagagagatcgagtgtttccatatccctaaacgagaagagatatcgagtgtctcaagattgatctgtttgacgacatgggtatcaatctttcttccctctaattacaaagtttattgctttattagataaagcgtttgtgggttttgttttgagcttagaaatgtttgggttttcttaagatctaaggatttgttcattatttgtagcaatggactctaatgcatatggtatagaattttaattctaattcaactgatatctcctgttttagtttcgatggatcagtgtgttaactttgttgagtatacgataataatatgttaagattttggatcatgctttttctcttgggagaacgatgcttatgtttttgttttgaatttgtaatctaatgtagaacgaaactactgaggaggtgaagaagtttagatgttgtgtcattttggaaagacaatgcaacccactttaaagaattgtcatcaatggtatgtgacatacttagtattcctatcacaattgtggcatcagagtcagcgtttcgcatcaaaagtcgcgttctcaacaaatatcttttacaaacaaatgtacaagcttttaaactatctataatggtttacttattcaacaccctctttttcactccacatcagtttctctctcttccacctaatttttcaacacccatttcaattttatcctctacaatagtttttctttgttttttgatcaaaggagagatttcattaaaccgaactaaaccgggattggtacagagttgtgaattgcaagctttgctaaagcatccgccttgctattcaatttcctagaaacaaagacaaacctaatttgtttaaaggaggaagatagagataggatatcaaagagaatcccatagagttccatctgaggaatctctgacgatatggcttcaattaactgtttcgagtcagaagcgattaaaaggtttgtgaaacccaaacgaacggccgtttggagtgcaaagaggacagcggtagcttcagccaggagtgacgatctgatacagtccaccctgacagatccgtggttgcttggacccgcgctgcagtttgagaagatccatccaaggcctgccactttgagatcgcctatccaagccgcatcggtgtgacagactacagctcttgggtcctgttggggaagatgttgccgctgtgagagttgaggggttaggctggtgggagcttgagaacggttccattcatgagccagggatatggcttgagtaagggtttcgcctgggttggttcgtttgtcattgaagatccgttggttacgggtgatccagattgaccatattatccagggatatagtggtccaacatttactccacaagggggaagacaggtatgggtttttgccttttcgataaaggcttggagtgaggtaaaggtagccggatctagatgtttctggaaagatgcatgatcccaaatccaggttgcgaactggcacttaacgaataaatgaaagggagtttctgcctcaccacaaaaaggacaatttgcctcgactcttaaaccccgcaaccggaggttttcccccgcaggtaaagcccctctcatagctttccacagaaggaattttgttttaggtgatgatttcaagttccagatttctgaagaccatttgaattcaggacctgcaggtgctggttggtgggcgagggcaatagttttgtttaataaatttcaacactctaccatttttattttattttattttatattcctttttatttatgttttctacttttataattatatattaataacgattagcgataaaataaaataaaaataattaagagttaataatatataaattttagatttttattttcttttccaaataatatataaagacaatatatagatattcattatgaagataaataaagttcagaaacataaaatgcaatatatgttggtgaagaaatttgttgaaaaaaccataatttggtatattttagagttggttggaaaactgattttgaaattgatatttgttgggatttggatagttaaaaatgttattagaagaattatgggtgtttaaagggttattattgacatgttgggatccattttataaaaagaagaattttttttgtcaaaatcatatgaaacaagtatctatttatatagagtactagatcttgaatcgcacgtacgtgcggagtgtatatataaagcatatgatttatatttagtagtattttaaatgaatttttttttgtaataaaaattagataaaagtatagatgaaagaataatagcatagtaaataagaatatttgtacacaaattgattttctgtttgattaatcatacattacgaagagcatgtgtagttattaatatatgtaacacttagcataataggcaaatattagaaaattatataagtagtaaggtttggtgcaaaacaaacacaattacagtatttatgtttttttgtgaaacataagtcatgtgtttaaatagatacaatattttcctaaaactttcaaataaaactatattaaaattattaaaaaataatacatgtaatttgtcatgaacctctaaagtctaaacgcatctttttttgtgtggcccaatatcaatatttagaccggagatttttttttttatgggccgtgattaatgttttagatgagctaaatgacattattggattcatttgttgaattgtatttatttaattaatgaattttatttgtagttatctggacatctattttttatttcaacactagttcattccgagctacacccgatatattttattaaagaagacttcaaattaatttagttgatattggtacatgattaagattaaatcgggaatctatattagttgatgttgcctctcctaagaattttttaagttagctgatgcgatggtatatctttaggctaattcttacattggtttcaaaaacaggttgatcttttgtttgctgatttgtctattatcattttttgagttatatatctatttaaggccctgaatgttttgtagttttttttaattgattttagtttctgggttttggattttggtttttgatttttgtagtttttgatttttcatgtagattttagtttttacaaaatcctgaatggaaatttatttaatttttagtttttctatataaaaaataaatgtcgcgtaaattattttaaaaaacccacaaaacttggttttaacaaataagtaaaatctactaaaatctggttttcctactttttaagaaatctactttttgcagaattatgaatggataattatttggtttttgcaaaatcaaaatccaaaactactccaaaaattacaaccattcaaggcctaaattgtcttctaaattggattttacatgtatgagaaattctttgagaataatgaaaaggattttcttctttagctcttgtttgaaaccatttagtaatattgttatttggtttgtgggaatcgttgttttagtttatttttgtttttttcctagttagtttagttggttatttctttaacgaattctttgatattttgttatgagcaatttctaagttttaatatgtttactattgttagctatgaattttgaacggcagtttcatcattatgattatgataagtaaattgaaaaatgtatgtgttgcagctaaaatagtgaaagagtagccaaaagtcgacataattgaaactccttattttaggcttattttgtgtatgtcagatagcctcattagcagataaataactacaatcgaagaaaatactctgttcttgaatttcaatcatttcttttacaacccttgttgtatcttgagtattggaggttgtggttttgcttttgtcgattaaaatggttgctttatccacttcttttgtaacatatttgaagagatatttgatagcatttgaagtattacaccattccacatttttgaggttgtaaatggagtcacacttaaaacccttttggtagtggaatcgccggtttgcagatatgaatccttgcactacgtttaattgtagaatgaatgattagtttggattcgtgttgggtatgtatattgaccatataatagacatacctaagagtcgatgagcagtaattcacaacccataaatatgttgtcttttttgaaattgcgggctgcctagtaatgaattagtcggagtaagacttctttctcactgaaatctacatcaatatcaacaaaattctgaaagctgaatggttggagagactcttgagctttatttagtgtcatactttgattgtattgagaggtcgtttttttttttttttctctgtgtgttgagggagattttgttttataatgaaacccaaagagatgtgaatgaagatagtggccattgaagtagatgtctcgggagtaaagatgcggaggggataatgttgaggaagtggaggtttggtaacagtggcgattttggtttttttatttattaggaatctgaagcgatataacttcagaggttagagatgatggggagagttgacgatgaagggtctgtgttttattagtgtagacttacttttttggggtctacaattttaagagatacaggtatttgtttgggccaagttttttaattagcagattggcccattggaactcttgtcgtgtagtattttttatggttttattggcatgcgtttttgtttttccaaatgaatacctgctgatggtaatatttgtttattaattcaactgtttaactaattagatgtttttttggcaaattccgactgctaaatttatgatttatgttttaccatacctccaaattgaattttatttttatgaacttgattttgttttttgattaattgagttaggtctataatataattttggtcgttttcttaactcattgatcattttttaaataaatgtttatatgaaaagtagattatatccagtgtacatttaattttggttttctaattaattattttttgggattgaaatattttcatttgtatttttattggatggcttattttatttttttgatggtgtttgtgttgatttggatttggttcaaaaaaagtttccgattttgaaacgtttaagtttttattttggtttctaatttgctaaatactgaggtttttctatgcatgacttgaaagtaaatgttggtaataagactattgatttcaatttgttgtaatgaagctaaagatatgttgtcttacatattggacaatttttctttgcatacaaccaagtcactatacattcatggtggtagatgtggttacatgctaggttgttgataatatcccttcctttgattgtttctaggcaaatagcgcagtattcattttcctccaatgtggttggtactcttttggctgtttctagatggggaatgagtacgtcggtgtcaattctagaagtagcttggaagttgtaatcagtaaccttgaagtatataataatggccatacttctctgactttctgttgatatgtggattggtgtagaaattggatgaacattgacgttattcttgttgcgttgctctcttgaatacaccctccatagtgtgtgatggtctttgacaatcttctttaagatgggttttggattacataattatgccgttactggactctctgtattgttaatagtggattagttagttttttgtaatgtgaaagtggacaattaaatttaaggttatttatattttattcttatcttcttattaagaaacgtagcagacacaaatctgggatttttagtcgactgttattttataggcgttctggaatgccggcgcggaccgaaggatgatgtttattagctagaaaaatcattcattctatatgggtagatctatatatgggccaatagttaagttatgtaatatatcatttttttggttaacgaaaatccatgtcatttgtaaatggtccttctcatttaacggtattttggataatcaaattggggtttttatattttgagttagaatcaaacgtgcataaagtctgcgctgtttttttttttgaataccagaaggttcggggtcaaagcccgtaatccccccgagcccgaaaccacatcatgtaatattattttcgtcccaagcgtcactcgagccgacgacctctaagcttcgcgtaaggtctttaccaattgagctaacgacctctaaccttcgcttcgttttttgactgtagtgttttttgctttttgattttgtttcctggtgagtgcctaattctttgtttatctgttaatttcgttaggggcaatttttcgtttttggtgtgggtattttgcatcaattggagtgagtagaaggagaggattgattgatttggtgttccaattctaccaaccggaaaggattagaagcgatgatgtatcttcagaccaactattacattggttttgaaagaataggtttgtcttctgtttgctaatttgtaattgtcattaattcagactttatatctattttaaccgtttggtaatatcgttatttggtttgtgggattcggtgtgttttaaaatttctatttacttggtaatttgttttaggaattattttatattgctttatgagcagtttgcgagttaggcgagtttcaatttttcgtaatttccttttggctatgaatctgaaatggaagtttgatatatgtaataagtaaataggtaaatgtatgtgttgcacctaaagtagtttaacaattggtaaaagtcgataattgttcccaaggaaataaacatattctgccaagttaatatctttcttctttaagacttgatggttgaagtttagaatgattccatacatcctcgtgagtgaatctggcaatggaaagagtataaatcttaatctagactgaaatttcacagattgcatgaaaatttctatgtgattcttttcaccatcgtattttctatttggaatgacttaccatgggatgatttgatgctgtagctgtgttttctagctccattgaattacaacctgatgttgagataagcttgaagtaacttgaggaataagttaaagagaagataatgtcaaaatatatttaggagttatctaatatattttgtattgtgatttggagttatctaaagttctatatataaggagatgcaagggtgttgcattacttatgagttttgagattaagaactttgtaaggattaggttttgagttagtttcctaaatcactaaagaaagagtcattatttacattgtgcttgatctaaggaattgtacaaagggtcttattcaataaagtggtatcagagcataaacaaattgaattaagaaccctagacgtgtgttgtattgaattgacggtccgatcaaaagctgcaaaatatgggagatattgttgcagcacatccgagagagatctcctcttcttcgtcttccattcagtgtctgatgctcaatagcacaaactatacagtttgggttattcgcatggaaaccactctgcaggtaaacaaggtttgggaaacgacagatccgggaatagaagacaacgacaaaaacaacatagcaagggctcttcttttccaatctataccagaagccttaacgttataagttggagttcataagactgcaaagaggtatgggatgcgataaaagagagaaatattggtgcggagagagttaaagatgcaaggctacaaactctaatggaagaattcgaaagaatgaagatgaaagatacggagaagattgatgattttgctggtagactttcagaagtatccacaaaatcagcatcattaggaaccaatattgaaatgccaaaacttgttaaaaagtttctcaatagtctgccaaggaaaaaatacattcatctcattgctgcacttgagcaagtacttgatgtcaacacgttaggttttgaagacattgttggacgtctaaaggtgtatgaagagagaacgtgtgacgaagatgatcaagggaagttgatgttgcggactcttaagataaatagaacgcaaaccgtgggagaggtggtagatcctacggaaggggaagaggacgaggtcgtaatggaggatatcgtgatagatctaaagtaatatgctaccgttgcgacaaattgggacattatgctttggattgtccggatagattactaaagctacaagagactcaagaaagtgagaatggagacactcaacaagctgatgccttgatgatgcatgagctagtatacattaatgagaagaatgtacaacgaaaagctcttgaagagaactcagattttaaagacatgtggtacttagacaatggcgctagcaatcatatgacaggaaaccttgagtatttttctaaaattgacaagacagtgacggggaaggttcggtttggcgatgactctcgaattgatataaagggaaaaggttccattccctttgtaagcaagaatggagactcaaagttactagaagatgtctactacataccggacttaagaagcaatataataagtcttggtcaagctactgaggctggatgtgacgtgagaatgagaaagggatacttaacgttgtttgatcgagagggagagcttttgatctgggcaaacagagcaagaaatcgtttgtataaagtgacacttgaagtaaaacaaaacaagtgtctccaactctctatgtctagtgactccatgaattggcatgacaggatgggacatattggctttgacaacatgaagacagtgatcaacaaggagctagttattagaataccaaaactcatcgtcgagaaacaaacgtgcacttcctgcttacttgggaagcaagtaaggcagtcgtttcctcaatcaacttcataccgagcttcaaatcctcttgaactagtacatggagatttatgcggacctattacacctcccacaacagcaaacaagaggtatatcttttctcttattgatgatttctcacgatatatgtggacgtttctgttaaaggagaaaagcgaggccttcgacaagttcaagatctttaaagtaagtgttgaacaagaaaccagagctactcttaagacatttcgaacatataggggtggagagtttgtgtccttggattttaatacgttttgtgatgtctctggcattaaaagacatttgacggcaccatactctccacaacataatggagttgtcgaaagacagaacagaacgctcttaggaatgacatgaagtgttctaaaacacatgagtattccaaactttctttggggcgaagctgtgcggcatgctacctatctgataaacagaattgcgacaagaactttaaacaatcaaactccgtatgaggcattaaagaacaagaaacctaatgtggagcacttacgtgtgtttggctgtgtgtgttacgcaaagactgaagctcctcatttgaagaaacttgatgatcgatctcggatgttagtgcatttaggaacatagtcggggtcaaaagcatatcgtcttttggatccaacaaagcggaaaatagtagtaagtcgagatgtagtctttgatgaagacaaaagctggaagtgggacaaaactgagcacgagagtgacaatgatcgaagaatgtttagtgtcagttttggagtttttggaaataaaggcataagagacgagagtgttgatcaagaagcagagaaagatgaagaagataaaaatgatcatgaggatatacaagaagattcagctcttgatggaaacgtcatagttccaatacaagaagaaatacccatgctaagaagatcagagagacaaacaagaccacccacctatctaaaggattacatactcttgtccgagttagagggtgaacggctccggcttgcaatcgatgaggaaccatgggatttttctgaagctatggaactaaaggagtggagagaagcatgtagagaagaaatatcgtccattgaaaaaaacagaacgtggaatttggttaatcgtcctcctcaagcaaaggcgataggacttaaatgggtttttaagctcaaacgaaactccgatggaaccatcaacaaatacaaggcgaggttggtagctaaaggatacgttcagaaacatggagtagactacgatgaagtctttgctctggtagcttgaatcgaaactatacgttttatcattgcacttgcagcttctagtggttgggaaattcatcacctcgacgtgaaaattgcttttcttcatggtgaattaaaggaagaagtctatgttgttcagcctgaaggttttattgttgagggaaaagaagatcaagtatacaagttaaacaaggctctttacggactcaaacaagctcctcgagcttggaaccataagctgaatcaaattcttatggaattaaaatttgttaagtgttccaaggagccctcgttgtaccgtaaaggagagaatgaagatcttcttattgtggcagtttatgttgatgatctacttgtaacaagatcttctctaagaatgatacttgaattcaagaaagaggtgtcaacaaaattcgagatgagtgatctaggaagactcacttattaccttggtatagaagtgttacagcatgagaatggcattatattgagtcaagagagatatgtgaataaaattcttgaagaaacaaagatggatggatgcaacgctgttcatataccaatgtgtgcaaatttaaagttgagtaaagcaaaggaggaggctagtatcgatgagaagtaatacagaagaaacattaggtaccttagatatctacttcatactcgaccggatctctcatacttcgttggagtcttaagtagatacatgcatgaaccaaaggaatcacatggagcagcgcttaaaaaagtcctaaggtacatagaaggaacaaaatcttacgggctatgcttcgagaagaaaacaaagagagatctagtaggctttagtgacagcagtcacaatgtggatgaagacgatggcaaaagcacgaccggacacatcttctttcttgacgagtgccctattacatggtgtacatagaaacaagaaacagtcgctatgtcgtcttgtgaagccgagttcatggctgcaactgaaggagctaagcaagtaatttggcttcaagagcttcttagtgaagttaccggagaatcatgtgagaaggtgaagctattgattgataacaagttcgcaatagctttggcaaaaaatccggtgttccatgggcgaagcaaacacatacacaagagatatcacttcattcgtgaatgtgtcgagaatgagaaagttgaagtactacatgtacccggggaagagcaaaaggccgacatcctaaccaaagcacttggtaggatcaagttcaaagagatgagagttatctaatatattttgtattgtgatttggagttatctaaagttctatatataaggagatgcaagggtgttgcattacttatgagttttgagattaagaactttgtaaggattaggttttgagttagtttcctaaatcaataaagaaaaagtctttatttacattgttcttgatctaaggaattctacgaagggtcttattcaatacctgaaacatttagaatagaaagtaagtacctatattttgtttggaagttagtgtaagtaatttaccagtttcttttgggaggtcattgtagaattccttgtagacaatatttttaacttcatcatttttttggtcatctccatgtagaattgttaggccaataggtgatgtaactctagaaagagctacgtagagttgtacatgactgaaaactggatttggtagatacagaacatcagattttaagctttgaccttgattttttatgatggtcatggcgtagcaaactctcattggaaattgttgtcttcgaagtgtaaaaggatgctctgattgtggtggggataagataaatcttggtatagaaaccattttaccagcatgcgtgcctgttactatttgggcttctatcacttgttcacccaaattagtgacaatcagtcttgtaccgttacacaaaccttccttttggttaaagtttcgcatctgcataattggaactcctttttttaggcttattttgtgtttcggcaaactaggaaactctaaagagtttaaatacttgacatggtagagggcttcataatctgctccgatcgtatccgcttttccaatgctatatgagcttaaatattcttttgaatcccctcctacctgagataacatgtatgcatttatctcatcaacatattcattgtgtggtgtaagaattcctcgttcggtcaagtattggaagttgggttgggagacactgaattgcacatatgctccctttgtgacttgttggagacgatttccgttatgcttcaaaaagaaagaagtgtccatttcgacgacttcaccatcatctgtttcacatgttggagcgtttccgtttcctacacttagtagccaagctgcaaattttgtttctaattggtggagtactctcatgtttttttctaaaacaaagacatggcaggcatcccataagtaggactgacttatagcagcaagtacagtgtctgctcgtgttccatttggtgtttattccttcatatgaatcttttcctacagcctgagattgagagaaaataattttagttggtggtgttagtttatacaacagagagtagtggtaaggaaaagtatacctccatgtattcatttaaaacatcacgaacgcttcttccagcaattttggtgccttcaccatcaaggacaacaaaagttccaacgtctccgtttttatcacgcactctcatttcgaaacagtacatgtggatttgagggttgggtacaacgttgtgtaatgttttgtaagaatataacctcatttaggtggttcatagttgtcagacctgataaagccaatgttgttgtattctttgcagtggttgtagtacattgatgtgtcttcggtttcaattttattgttgcaaatgctgcacgagatgtagtaccatctatattgtggttgtatgtccacaactatagcaaagcaagtgaagctaacttcctacattggtaaagttaggtttcttaaagcagtaagaaataatggtcaatgtgatttgtaaataaagagagaatactttgaatataacatgtgggttttcattttgtagaaactagtttatttcattgattttgatgtctccagttttattacagcaaaggaggagcttgcgatagttggcgttttttttaccactatctcctaacatggtggtggtaagttagtgacttagggatgtggaatatggttgtttaaggagattcttatgttagaaagagatgcataccaagtaagaaactggttggtttcgtcgaggttggtgtcaaagaatagacgcgtggatgatgtggagctgagagacacagcagctgaagagattttgcagattaaattttagaattattgtataatttaatgttacgaagaatatgggacagtggtgaagaagtgatttatacctccaattgttttcgggttgacagtagtgataaggaggactattggtttgaattcactttggttccacctttctctaaatgttgccgcaatgtttcgctagagatttatgcgtatggtctgaccgctgtaaattaagagctggttatattttttatatataattggaatgaatgtttttgaaaagaagatgataagatgcattactatttgagtagtaggtgtaagaaaactcgatcgtttgatctggtgccttcaacatgggggactgtttccattctggtaggggagtgtaggttgtcatcactaattaggcgtagttttccaatgacgtctacaaaacacataagtagaaggagttgtcgtgaaaatattatttgaaaagcgtaggatgtattagaagtagcttaccaaagaggtcaatatttgtgtccacagttgaagcaaattcttcgaaaccacataaactaaacttctgctcatcaatttgatggtctgccgttaggcatgagtaccatagacgttttgtcgttgaagaagatgtcgtgtttgtggtcggagactttgtatatttttttgcagggggtgatcagaaattttttgagcttgtgaatggagtttcgtttaagactctcttggtaacgaaatagacggtttgttgatatgaattcttgcactgtgtttgactgtaggatgaatgattagtttggatataaacgacggcgagtgttggtgacgacgtaggttttttttttcatttttttttgacgaagtagggtttatattgtattattagtagattcttttgggccaacgtttttgaagagatgtggatttgtatttattttgggccaatgagttttattagtattggtccattagagttgttgaggtgtactttttgatgcttattttgacatccgtttaattccgagaaagtagatgcagacgtgtctattagggagagcacttttgagaatattgaggtggacaccttgagaggcctcgaggagttccttttattagtagtagattcattgtcttactttggaaaaacatcttgccatctaaaacaaaacaaaaatcattgtcggcagatcgatgatttcgtaccaaaattcacatataatcgacataaatcgtctttatttatactttgttgttgggaaattgttagatctgaagagaggtaagttttttctttaatcagattcatgtttttccaaaacctgtcgattgagtttatagtctctgatttttttagtttctgtataaaactttgtcaaaaatagtgaagtcgccagagaaaattgggtaattattcacctttgcatatcttattagatatctacgtgttaaacttttgtaaaatcatttagcaagtgttaaactcaaaaaagtatatgtgttgtaaaagcgtgtcaaaaatcaaaataaaattacaataacatctaaaaattaaaactgtatcactccgctaacctttaacatcttcttcaatggatctgagtagctcaaaatgatggcattgaacctccctttcataagaattatactttgacatgaatattggactgcaaacattaaactttcaatgattaggaccataaaagttaaagtgaccggatcacaaatatacaatgatttattattgtctgataattggaatagaaagattattttcttcggaatcatcttcttttggcaaaattgtctttgtaaaacttatcttctctgctcttctttcactataagaaaacatgcgatttgcgaggaaaatttggaatggaaaatatccttcgcaaattgctacagaattgcaagacgtttgcgagggaaaaggacaaccacgctactccgtcgcaaaatatgcaacgagcatttccctcgcaaatttgcgagacgtttgcgaggaaactgcgtggaaagcacgattcttcgcaaaaacatcgcaaatttgcgagggagttgcgagtaacataaatccattgcacattgcgacacctttgcgacgcgtatgtattctgtagcaatttttgcgacggatttgcgagtcttcgcgggttaggtgagcacgttttaaattatcttaccgaactggttggtaagtgggattccctcgcaaatttctagcaaaaaagcttagttccttgcaaatccctcgcaagcggcctggcaattccctcgcaatatttttttggacatctataaatagccaacgtaacgtctaagaaatcataactcaaatcacaacatttacttacaaacaaaaaaatcttttcaaaaaaaaaacttcttacaaaaataataatgtcttggggtggagagcatgagatttacacattacgaagttggatgtacaatcatagagatcaagcgactggtgaggtgacgagagagtattgtgacggactgtgcagtttcaatattctgtccatctcgtaagtgtctcaatgagaaatatttggaatttaatgtagtcaagaagcatctttataatagaggatttatgccaaactactatgtctggttacgtcatgaagaggattgtagatatagcgcatgaactagtaaaacaaattatggtgtcgagcaacctagtaattttaataatgatgcgaattatggtcagcatgtacctgatcaatttggttatgggcataataaggaaaatagatttcatgatatggttacagatgcatccatagcaatttgcgagggacttacgactatgcctcacaattcactcgccgaaggggccgaaaaccctaatcgagtattccttgcaaattggtcgcaatttgcgaaggatttacgacaacgcctcgcaaatccctcgcagaagaagtcgcaaaatcctaattgagtaaccctacttttgcgaggaatttgtgagggtcgttgcaattccctcgtagaagaagccgcaaaccctagttgagtaaccctaatttggcgaggaatttgcgatggtcgttgtaattccctcgcagaagaagccgcgaaaccctaattgagttattgtctgttgtggttgtatttgtcttggcattgttacttagcttagggtcttggtttcattatgtaattggattcgttattatcttgatttgtttgtctctgttttggttgcattatgcaatagtgacttggtatttgtttttggttttgagtttctcttaggtggctccaaagaagaaagggaggatatatggggctggttcattgcagctagaagcctcatcagctcacattggtccttcagttcctcgagaagatccgggtgaactctctcaaaagctggctgccgctgaagctcttattgcaaaccaagcggagaagattagttgctttcatgtgtacttcgactaccttgcggagaaagatccatactttgctgccatctttcgagctggatcttctaggacagaacctctcggctccaaccagccacctgagatgccaaatgccacacgaactacagctgttgggatcgcaccacctgttgctgttgaagctgaaacagttagagctgaggaggcagttgagactgaggcaaacaacattggatcctctccatctcttgctttctaaaaaacttgcaacactctgtttttatttctctcatctaaaccctaaaacttgcaacactcttttgtataattattttgtttgcttcataattttatttgaacaccaaagtttcagtgttaataatatgagtttaggctatcaactaagtttctaattcagtgctaataccaaaaattaagattaaattaagttaagcaaacaattaagaagacaattaagctaaacagaacagtaatcacgtttacctaataattaagaacgtcgcaaaaacatcgcaaatttacgagggagttgcgggtaacagaaatcccttgcacattgcgacgcctttgcgacgcgtatgtattctgcagcaatttttgcgacggatttgcgagtcttcgcgtgttaggtgaacacgttttaaattatcttaccgaactggttggtaggtgggattccctcgcaaattcctagcaaaaaagcttagttccttgcaaatccctcgcagcggccttgcaattccctcacaatatttttgtggacatctataaatagccaacgtaacgtctaagaaatcataactcaaatcacaacatttacttacaaacaaaaaaaatattttcaaaaaaaaaacttcttacaaaaataataatgtcttggggtggagagcatgagatttacacattacaaagttggatgtacaatcatagagatcaagcgaccggtgaggtgacgagagagtattatgacggactgcgcagtttcatgtatcaagcgacaaacgaaccatttgctcgtgagaacggtacaatattctgtccatgtcgtgagtgtctcaatgagaaatatttggaatttaatgtagtcaagaagcatctttataatagaggatttatgccaaactactatgtctgggtacgtcatggaaagggttgtagagatagcgcatgaactagtaaaacaaattatggtgtcgagcaacctagtaattttaataatgatgcgaattatggtcagcatgtacctgatcaatttggttatgggcataatgaagaaaatagatttcatgatatggttacaaatgcatcaatagcaatttgcgagggacttacgactatgcctcacaattcactcgccgaaaaccctaatcgagtattccttgcaaattggtcacaatttgcgaaggatttacgacaacgcctcgcaaatccctcgcagaagaagcctcaatatcctaattgagtaaccctaattttgcgaggaatttgcgagggtcgttgcaattccctcgcagaagaagccgcgaaaccctaattgagtaacccaaatgccacaggaactacagctgctggaatcgcaccacctgttgctgttgaagctgaaacagttagagctgaggaggcagttgagactgcggcaaacaacactggatcctctccatctcttgctttctaaaaaacttgcaacactctgttattatttctctcatctaaaccctaaaacttgcaacactcttttgtataattattttgtttgcttcataattttatttgaacaccaaagtttcagtgttaataatatgagtttaggctatcaactaagttcctaattcagtgctaataccaaaaattaagattagattaacttaagaaaacaattaaaaagataattaagctaaacagaacagtaatcatgtttacctaataatcaaggatgtcgcaaaaacctagcaagtccatcgcaaaagttgcgagggatttgctactacaaacgcaggaactcgcaactccttcgcaggtttgctacagaattattgattgcaaatccctcgcaaagtttgcgaggaattagggagacagctcatttgcggtgaatttgcgacgttttatttcccttgcaaattgcaagaggttagcgagacatctatttcctcgcaaattttgcgagagaattacgaccgtttctcatttgcgacgagcgttttgcgaggaagtgtcgttcgtcgcaatttcctcgctaatagctatttgcgagggattagctacggttttgtccctcgcaaatgacttgttttcttgttgtttgacaacttgcactatctgtttataataatctgaaacaattataaatcatcatgtccttagatatatttcaggtttcacaatatacataaaaattgcatattgatacatattttatttttgttgaacaatctgtttctacaaaattttagtttatatagactaaacaagtataatcaatttggaatcaatatgaaatttttatgtatattttgaaacctgaaatatatctaaggacatgatgattctataattgtttgagattattataaacagatcgtgcaagttgtaaataaaaattgaattcacgtgactatataaaaattgaatcagttaaaaagggaagggaagtttgactgtatgtatagttcaatatttatttagtttagaaagagtgggaaatgcaaacttggtttttagatattagccatactcactaaaaattggaaaataaccataaaaaccctagaacaaatgggggaatctatactatataaaagttgaggttatttgcttctattggcgtccacataagatttagaacgaccaatcgagagctgccacatcaataattaacatatttagcatctaattaattaacatttttgaaaatagtaattactttctatttttttaaaggaaaataacaaagtactaaatttaaacttataaaaaaggaaactaagtaattataattatgtaatattaaatccaaacttataggattttacaaaactaatccagagcagccacaccataagttaacatttttaaatctaattaattaacatattaaaatatattaaccaaaattctttttaaaaaaacatgatgcaatttattctaattaattaaaattaccaaattttaaaatttataaacttctaaagacatccacataggattttaaacgaccaatcgtagttagccatgtcatgaattaacatacttggattatgataattttctatttaaaattttagtaaaaggaaaaacgccaataagaaaaatatttgaatatatgaaaatatttcaaaatataatcttttgttattataaacataatataaaaataatcaaattttaaagttttaatttagtgattaacatttttagatatctcactaattaagttttccaatacttgtggattttaaatcgtatacatgtgaacgtattaataactaagtgcaagtggtggcgttgttggtcttgaattgcacaaatcttacgagaaaagaggttgcaggaggttggttgggacaagttgtgtggtattctaaaacaaattattttgaatggttattcagtaattttgaagaatgcaacatcaaatgcttatattcagaaattgtcgatggcttaaaaatctaaggaagtataggtggtggtaagaattgaggaacatacatgtaggaccgtggaaggaagttgtcttaggaatatgtttagatcaatatagtaaaaattgtttacgtgaaattgtaagtggatggagctatggttagtgacgtaagttattacatggttcttttaaaaaatttggttgaatatactttagttggatgatatctaacaggaaaaaaggtatggagacttgtgttgaaattgtggaagacgttgttcttcttggagtacaaatttcaatctagaacgagaatcggcaagacgtaaaaaaagggataaaattttaactaatgagagttctcttgcattatgaacaattaaagtcataatctagataacaaagataaatgttttccatgtaaaaattgaaggagaaaaagataaatgtgtatagatttgcgacaagaaagagagatataaagagacaaccatttttttatgaagaagaggtcatattgtgacagtataagacaagtttagattaatagttaagaaaaaaaggtgagaaaacagctattacatgaactccttaaaacaacatttagttcatatatttaggagtttctggtattaatatctttaggttgaatggtggatatacattcaaacgttttttgtatgtgtattttatctaagcttcttcaatctgtttgaaaagatttttcttcttaagttttaaatatgaccagtctgtagagacatcaaacaaacatcccaacatagttggaataatctgaaatttggtaggagaagtggaactaagttctggtatgaagacatcaaattttgagttcaaaatgttaaatgaacaacagtgttccgggttgtttaatttatttataggcttatagaactatgttgggttaaggttagtatgtttaaattcattcttgttttcaacccataataacggatgtattacgtagaagaagatggaggagaagatgaggaagaaaatgatgaagatgacgaaaaagaggaagaagaagaatataataaagaagcggatggtgaaagtaacaaaaataatgaccatgaatttgataataaaaataacgagaaggaatataaagagtatacaaagacatgtgttgacaatgatttgaatatgagaaatgagtttttttttttttggaaatagtaatttaaaaattttaaaaaccatcacattataattatactgaattttactcagaatgactctaattttgaaagaaataactattttgactcacgtcctagatggtttactacaatgactcacattttaagttaaatgactaattaaccttgtttagttgtaattccttgttttaattcaaaatgtttttattttaataataatattaaaaaactctcaatcccaaataacaaaaataaggaactcgtatcattaggttctccactcgccgcattaggctttgcatgtctcttcttcaccgatttttgatcgaaactccagcaaacctgtaattgaattcgccgttttagaaggcagctttccgagtagtaatcatctcttctccggtggtggcgttgctgcttcttctcactcaatcgagggatacttcttctccggtggtgactgcgttgtgggtttcggatacacaaacggctgtgaggagtttgcctcttttccagtttcacctgcggaggtggacagcggtgggcgttcatgtccgacggtttagggttcttcccattcatcgttaataactgttgggttctttttttaattggattcgatataggtaaattcagagtcaatcagatgtgaaatcagctttagattcatcccttttccaattgaagattgtgaaattgactctcgactaatgaaaattggttttggtttgttgtatatctacatgttcttcttctccggccacacaaacggcggcgaattggtgtttctctcaatcaggtctgacggtttctctcctctggtggtggcagtttctcttctcaacattcgttataggtaaacacatttagaatccggtttttgattaattccctttccgattgaagtttacgaataggactttcgagtaaagaatttgttatcagttgcagatcttttttctaatcgccggcgtcactggtcataactccggtaagagtatcgagaataactcaatacttttagaaaaatcctatcgtttgcatttctgttgctttggaaatcagagtgtgatttatttgtattgttgcagatcttttttctcatttgcattggtggatttagagttcattactctagtctctagtaagtgtttgagcctatatcgtctgtattttgttttaagaaaaactcccgcctatgtatgatttttcttttgaatttctgagttgttttgacagatttattcaatttttaatagattggtgacagagttgttatgattttagtttgtcaatctcataaggcacctaagatcttaagttatttgcttatgcaaccttgttttttctgtgattaggaatggcgtcttctagtcatacccgcagttatccgcttcgcttgtatcaagaaggaatatcaccgttgcaaaaaaggagtatggcccacagctgctatgtttctcaaattgggaagatcaaagatggattaggtgcagatgtgtgggatgagttgaagaaaacttcacttggtctttttataaagtttactgaaagtggatttgtatgggttgcccagacagttcatttcttcctcacgaatcagttgcgagtcgacaacatgcatgagatgtggtgtttgttgatcgcaggccaataagattttcgctctacgagtttgagaacataacgggcctcaattgcgatatgtttgacgagtctgacactggtgaaactgattacatagttttctggaattaaatgggggtagcaacgtctgttggtccattgtttacagagttggaacgtgtatttgagattagcaagacatggagtttggagaagaggatgatggttggtagattatgtttactatctgttggagtacatgggattcatcacggttctagagtcccgttgtcgagtgctaaaagagtgcttgatcctgttgcttttgagaagtatccttggggtcgagtggcttttgactctctattaaggtctgtgaagattgtcaagtgtgacggagattcttatgtaattcacggttgtgttcaggccttgcttgtgtggatatatgagagtgtgcctggaattggagaagcttgtgggtttggaaaaacaacactgacgtgtgttccgctacttgattggagatcttctagaaaacgtttcaactttaccgctttcattgaaaaggagaaggctgcccacagacaggtatgcaaggttttctagatcaaatctgctgcttgtctttaaaaaaaactgaaactaaacttgcataaacgttttagattaagcttgtgattatatgtatgtaggtgcgtgtgaggcatatgatccctgtatccgaagaaaacatgtaccctaaatggagtgactcagcagagaatcaggatatggcgcttgacaacttgcttaaagacatcatccacaaccgtttacagcctcatgcgttgacacatgtggcagcacgacgtaagaggaaacagaatcagggatcatcaaatgaggatggtgagagtaaactgatggagtcaacgcctgcagatgatgttatagcagaagtatctcataagaagcaaagaacagggaaagctcatgtttttaccatttccgattttttcatatacataggtctatatgttgacagtgaattaactaacattgttatatgcttcattataggtcaatgaagaggagaagacaagcttgctggatatttggaatatgttagagaaaatgaatgtcacagttagtgacattgacaagaatgcaagcagcagattggatgggttgcagaagaaagttacttgcttagaagcgagtgtaaaaacaaggtttgaagctgtggagactgatatgagagttcttaaagagtgtcagccccctgtagtatccaatgaagctgccacatcaaacaacaatgatgaatatgaggcaaatagtaaccaacctgtaagtagctgtcagttattaattttacatgttttgcattttggatttgacttttgactctttattaaaccgtatgtgtactgtgtttttttcagtcttgggtagtagaggagaagccaggttctgttgatgggttgcctattcaaagagtggttaagaaggctgttaattcagtgaagaacaaggaagctggtacaaaggtccttactaagaagaaagttgcaaaatctgataagaagaagataattgtcaatgtagagaaggtaggaaaaccaaaacctgaaatgaagaagacagttgtgaaggtagagaaggtagatagttcaaaacctgagaagaagaagtctggtgcagctccaacaacaaagacgtttgatgatgatgttgtggatgtcactgacaaggttaatgcagacaatctgaaaatggcatcaagttttgaagaaacattctccaatcctctagatcagatggctaataaggcaacggctgatgcattgagagcacttcaagaaggactagataatctggactgtgttccttgactcataattgaatatttaatgcattaaattcaaatatggtaatatttcggaaacatctgccggctaataaaaaagtctgtcgtaacgttttcaaaaaaaaaaaaaaaaactcgaatcataccggatttaacatacaatcaaaccggaaataatttaattgagggctagctaataaatctcatataacaaaaaaatttgaaattttaaaaacaaatctgccaaaaaagtctgttattactaaaaaggttattctagtcataaacaaatcgaccataatattgacatgagtaaatctgttatgcttttgacactgaaaaacaaaactgccatcactaaaaacaaatctgttatcactatctgactatctagtaattttattttttaaccaaaatctgttgtaaaataccagatttgttaacaagttaattaaatatgtgattacaaaaacaactttgtcatgactatataacatttttccaggttaacaaatctgttataacacaaaacatttttgggtagaaatagaaaatctgttgccaccataaagaaaaatctgcggtatggaaaacaaatcagtgacagatttggtttcaacattcttaattttgaaatttaaataaaatctgtggagactatatgaaacaaatcagtcacagtaaaaaaatctgcgaaaaaataaaaatctggcgtaacataacacagtaaagtttgtggtacaaaacaagtctgatgtaaaaaatttgtggttgaccaaaaaatctgtgatcgataacaaatccgtcgcaacaagagccacaaatttaccaaaaacgacgatgacattttcgtaaataaatgtggttttattgccatgctggaattaaatagtaatggcatttctgtaatattgtttttctgtaaaggaaaacagggatatttttggtttattactcaaataacccatttttttagcattccttttgggtcattatgtataaaatatgggtcactctagtaatttttccttaattatataagataatatttaataactatcatcaatcaaaaataattttagccaaaatatattaagtaaccccacgcgtagcgtggattcaaaacctagtaatacaacaaattaatgatgaaatgaatgtgcacaagtaaaaccatttgaaaaataaatggtcccgagagaaattctactgaaacgaacattatattacaattcaaaacttacatcgttccaatagttaacaagtacaacgatccaatccccagaaataaaaactatccacaagatgttgtccaaagtttgctacattgttctaataacttacaaaaataggtagcatcctatgtccaaaaacaattaccacaggactatagtgattcaaacgcataccaaccaccagtaatttcaaaaaaaagaaatctaataataatattatctaagaaaacaccatctatgcaatcagtagatggtgacatagttccacgaaagggtgcttaccctatggatcatttgacgggttaacatagatgagagcaatgtagtgttgaaaaacattccttgcgtactgctgtctaagtctgtcgacatggtcatcacttagcaaaccaacagtcccggtataatgcatctccatcagcttaatggataaaggaccacagtcccctgatcgcacatcttgtacccatctttaaggcattgccacatgaaaggagctaagccaccatcttgagagggcagaggttcacactatttacggattaaataagggacttgctcaacaacaggggcgatttaactttgagaccttcttgtcatctatgagatcaacaatcaggtcaagaatctcaacaagtctattgccaaggtggattactactccaacccaatgtctaccttcccataacagtggaaagtagacagtgtgaacatcgataaaccatgtttttccgggagtggtgacaaattttcttaaatcatcaaaccatctaagtttgttcttgcatttggctgccagaagagaatattctttagttaagatatatgtttaaaaccgaatgagtaaattagagatatttagacaaaatttaagggatttattttgcgttggattattgttaggtgttaataaatttgtttgttaaggaaattaagcaaatgattttgtttgtttaggtaaattgaatgcctacaaatattaaggtatattttaacgaaatctataatattgttttatttaggagataacagattctaaaattttataaagtcaatgatttgaagataatatatgttaaaatcccgcacgtacatgccatcaataatttatttttaatttttaatagatttgtttgttatggaaactatatgtaaaaggttagatttgaatatggattcgaatatatatatgatagaggtaatatttacagctattataattggtaaatgatagaatatgaatttaaatatattgattgatctgtaattttaggttagttatagaagtacaaatattttttccgatgagatttacggaatgcaatattcttaaggttagttataaacacctttatattgccttatctgcaagaatttaaggaatgcaatctattcttattcaatgtaatgaattatgtttagaaatttaaggtgtttgattcaatattaatgggttgttattttgtaatatgcacccccattaagcccattaatgtcttgaattcttgctttgttttggatccaaaaactagttccatttcagattggatagtgatctgctagaatttattaaattggattagttgttaatttactaaataatccatgcgaaaattcatttagttagtcttaaactacccctcaaatgttgtagttcacaaaatgattcccaattagtagtatagatgtataattgtgaatggaaaattagattttaaaaagtgtaaaaactaatttttgataatgcaatattattatttattaattaaaatttgataattcagaaaacctgtctaaagtggcccataattcaagccgaaatatatgttaacatttacccaattttgaaagactcttagtttctttataattttttattgtattttttttgacagatcacttattgtttttagaacaatgttttcttatcttaaaaaaaaaagaaacccaccgaatacaattaagaatagtggtcgatctcataaagaattggctatttttgtcttcaattaggatatgtgttttgcaaaaacgaattgtataaagagataagcttattattgaattaggtttttttttttactgtttttaatatgtagattcaatttcaatatgttgttcttccccttttcgttttttaaatttgggattccgcatttcgtaatgctatcattcagtctcgtaccaaaacaaatctgctaaatttgatgatagagattgaaatttagtgtcttttgagctcgaaattagattttatattggtttgatgcatatgtgatgatggtttccttagcattggtcttttcgattaattgcttccttgtctctgaattcttttgggctctttttttcttatcagttttgaattagtgaagcgttatgctcttgttgtatagtctctaacaggttttactcaaaatatgtgttttttttatctcttttagatgttgtagtttgaaattgccttgctatgggaacaatcgtctttatgttggccgcttatcatccataactcgtaccgacacattaacgtctatttagcagatatcgaaagtaatttcttattctatatctctttcaggcatgtccattaagaaacatgaaaaatgttccatctttttctgttcgaaattttgcgtcccataatcgtttttgtttgcaaatatttattttgggtcagtaatgtgtgataaggaaagtagatccaatactcatatttccgtctatctcataaggaatgcatatattatcgctgatttgtggccttgttgttgacatcatgagttttcatctcgccaaaacttacgacttgtacgactaatactatttggttttaaaaaaaaaactaaaataaatacatgataacaaacccgtctgcccatggaaaaaagaagaacctctatctcgctccatctctcgaattcacataattggtagtgagagcaaatcagctcaaggtaggattaatctcgtatttttggattgaaaccttagggaaaaacagattatggtaggattgatcgaatcctcgtgctaatgatgatcacactctctcatatcaagaattcaagtatcccattgaatcctcgtgttaatgatgatctcactctttgatgttgtaagtgattttgtttaattctttcattcctttataacttgattcgcgtttaacaatgtgttattacaccttttgattgaagttgagccgattttgttgaagatcacgtatcgttgccagaacactgattctcataactatctctctaattgatttgagattaaaccatgatctttgttaattctagatttgtagccccttgatttcattctatcaaatcactgaaatttatttgaggaatcaaaagataaagtttatagaattaaatctttgattttcactttggtgttaatgttaggtggtgatatatatacatgatcaattagggtcttctcacttcaagcttgcatccttttctctttcaaagtgagtgtatctcttgattttatttacgctcaatggttagttattttttatagtctccaagttgcaatctattgttgtgtgttacttttcgtttagatgctgttgttcttgacttatgttcatgtagtttttataaactaaaaattatgggggtgtggcacaaacgtgatttggatgtgtgttggtaattgttaattatgaatagaaagcaccatccttgttcattgaatgataatgtagattgttaggttttaactagtgatgtattgtttataaatattttgatggctagtttcgatattacgatgggagattcgctagatacacaaggtgtgaaatctaaaggtccaaataaaaattggtgtgaacctgaacacaagatgttaatgtggctccttatgaaagaaattaatcagggtttacgtgatgttagtggcaagtttaacaaattaacggtggagacaagttttttaccagctatacacaggcagcttggaacaaacaaaacctcaccgagtaaaggaataggatgaagatcttgaagggtatgtacaaaagcttgtttgatcttcttcgtttcagttttgggttagggtgggatcctacaacgaagaaattcacggctagagatgatgtatgggatgactatttgaaggtaccaaaaattataacatgtaattaatcaacatagtagtacttatgtataaaattaaatttactgattctttgaacatgctcatctaaacaaaagtcatatgtgtaatgcgtcatttgaagattttgaggatttaagaatgatatttggattgaatgtggcaactggacaaaatgttgtgggattaggcgattccattgttgtcgatgcttctcaagttggagatgatgatgggccacatgatttaagtcatgtccaaatattagatgatatggggggatcccatgacgttttctcatcattagagaaaagaagggctgaatcgatgcaagttcaggcaagggaatggatgaaatacatacagtgaaatagtttggtaatcaaattttgatatgattccaagaagatgggaaaaggaagctgaagaaaaggaagtcgaagacaaagctaataatgtgtgggatgctatcaaagaaatttcagatttggatgcagatttatgttacgagaccatgacattggttgacagtttaggtatgaaatctgtatttgtgcacatgtcaacagaacaacataagggatggattatgcgaagccttcgtaaataaaaagaatgaagttggatgcgtcaaatatttggatggttttccacgttggagttatttttttttgcttgcaattctttgaactagattatggttttttacttttcgttttagcaagtgttctttaagctttctttgattttattttcaatttgagcttgttcgttaactagtttctttttggtgtacgaacatatgaatcatccatatgtatcagttttgaataagtagttcctcgttgtttaatgtttttgtatcatatgaatcagtttctacaattaccctgttcggcacgtggtcgcagcgaccagtttctacaactccaaaatagacgtcgacggagttcagattattaaaaggagtcgctcaaaattccagcgatccattttatgttacgtgacactccctatctctctcttgcgacacctacttcatatcgtcaccgccgttttgctttgtgctttgcttccgtcactgctgttttgcttggtctctgacatagtcgtagagactagttaaagaacatggccaattatgcacgaactacttttaaaagatgggaataaatcaaaaccaaatactactataaaaggtaaaacaatcgaagcatattgcaactgataaataaaatttcccatcttttaaataaaacaatcaaagcatattcaacctcaaaattttgacagagatgaatggtagcaagaaattctgtgtaatttccagaattagcacccaatattcgacaattttcccaaacatagaatagaagatatacctatatttaattattctacctaaaataaacaaaataacatatttttattttctggttttgataactataattgtagcgggtaaatataattaagcttggtggggattatttggaggataaactaggtctacatatgtatataatgtgacctctccctcattctccattagccgccgacttgttgctttcttaagcgtgaggtacatgcgtttctataacttattttattctgcctcagttgaaaaagttctgtctctatgtattagcagtaggaacatcctttttttttgtttaagcagtagtaacacatcaatctgattcagtcttctttaatttgtcatttctaatcaaacgataaaaagtaaaatgttggttattttgtttgtaaagagttgatcgtgtttaatttgtgagatcgttaacaaacaaaagtcgtctcaaggacagttactctgttggagagttactcaagtcgtctcaaagagagtatattagcagtacggacatcctctttttttttttttgtttaagcagtagtaacacatcaattctgatccagactttcagttttgtctacttttcttggtgctaaaacgttttatgtaattatgttttcgtataggattttgataattgatcatattgttcaacaaaatgaagagatgcaaggtagaagaaaaagaaagagaatgagaaatttgagtcagatgttgatattttgttacgggatttgtcgatccttgcgaaaatttgatattttgcttcacaaatgccacaacatattagaaaaccaactactagacttgggcatgaatacatacaaaatgtgttggttgaagatcgcgatcattttcgacatttgtatcgcatgtatccagaagcattcctgaaattatgcagtatttttcgagtgacgattggtttaagagatacaaggatagattcagtttcagttgaagaaatatttgccacctttttgttcattgttgggaaaaattcgaggtatatacaggctcaagatagattgaagaggtcgagagtctcaatacgtacgagcttaaatacaatcttgaaggtgttaaatgcacttgcaccaagctatatggctaaacctagacttgcagtgcccaccaaaataaaagacagcaaacaattttatccttattttaaggtacgtggttattttttgtgtgtttatttcttttaagtatagtaaattttaaccatttgttttaattttcctaggattgtgtgggcgctattgatggaacacatatccctgcaatgataacaggaaaataaacagctagttcgtaatcaaaaaggacaattatctcaaaatgttttagctgcatgcaattttgatttagaatttatatacgttctaagtggatgggaacgttcaactcatgacgcaaagatattagatgatgtcttaacaagaaacaaaaacaaattaaaatttcctgaaggtatatcgtttagaatctaacaaaatattatttttgttattaatttgtattttatcctacttatatttgtgtactttaaattacagaaaacttttatttagttgattgtggaatcgccactcgtcgtaattttttagcttcattttaacgtactcggtatcatctccaaaactttagaggacaaagtaaagatcccaacaatcaaaatgatatgttcaaccatcgtcattctagcttgcaaaacgtaatagagagtatttttataattttcaaattaagatttttcatcttcaaatctgcacctccctttccatataagacgcaagcatagttagtacttgcatgtgctgttttacgtaattatcttcgtaaagaatatcgttcggacgtgtttcttcctgaagaaggtgttctcgaagaaaatgacattaatgaaagcggcgatgatgaaaataatgcgtatgaagaggctcaaggtattcaagaacaacaaagagtacttgctaataattggagagcaacaatagcagaaaacatgtggacatctgttatgaatatagaatcataatgatatacattttatgttatatttttagattttattttttatattggcttgttgagatttgagacttgacagtgttgattgtcaacatatctgactgaacgtcaacaacaattcttggagcaagaagctctttcgctttttgattgaattatgatttcatattttttggctttatcaagattatatgaacgtttctatgggtcttacatgtgtttgggcacataatatgagttatagtataaaaatgttaataatatgatcattttatgataaaaataagatctaatgaagcaaagaatatatagtctcagccataatcatttccaatgtttcactagtttattgtgtgtattgtgtctaggagtggacaatcttcacttggttcttccaattcatcttgaaaggtgtgatgtcagcaaggttggtgataccaaaatttgcagccatgttttcaaaggagtatgtagagaagaatatttatatgaaaggttattgtgtatatacacttattacactatgactatatttatatgaaatgaaacgggtgagattattttagggtttagagaacgaatatcaacaaccgtatattagcgaataaggattttaaaggtatatgctcgatttgataatatctcaatatctagttttcgctagatttcggaaataaaatactttttcattgtatataatgatattatgatttatttagttatcaatattgaactgatttttttgttatgagaatgtaatgattaattcgaataattttctagttctcgatattgaattgatttgtttgttatatatggaaatcaggttaaatgataacttacaaaaccttttatgtcattaatctccaaagatctcactaaatctcttgaaaacttgacaggctgaatctccgaagatctcattcaacaaccacaaagccatgttcaacaaccacgaagcccggttaaacaacatcgaaaccttataacattgagaagcaatggcaatcagatcatccaatattacactctagatccgcgtgttttaccgtatttaataaatatagatctgacacgacgttgtgatgtcatttacgttattttgaaatagtataaatgtttctaattaaaaatttaaaacaaatagttgaaccatcattggttcaggtgcaagagcaaattagatgaaccgcatggcagaacttgatctggttctatttttatgtgtttttttccatcttcattggttccaacggtggcagctgcgaaatccgctattgggttagccattttcgttataactttccgagtcgtttttatatatataatacatataatattttttagaatataacttaaaatcagtttaaaaattacttcatataaaatgttttgctatattatcatctgtttattttcttcaaagaatcacatgtttactaacatttacgaaatatctcttaaagttttaaataataatatattttggactcttaaagtatttgttcatttaattcaaaaatacatattcaaatatggtaaattaataaagaaaattcaatttaagatatttaaaaaattacgtatttttaaaatcttttatttaaaatacatgttaaagaatatgtgaaaccaatattacaaattaatataattattttagtatgtgtactttatgtaaaacatttatttaaaattaatatatatatttcatttgtaacgcttgatccgctttcaccattcaacaaatattttgacgtgttcgaaccgcaaattaagaaaataagtaaatattttgtcttaacttttactaatacctttttccaaacaaaataaaagagagtcaaattgtgagtgaaaatgtcataaagatatttttaatatagtaaaggtgagtgaaagtttatgttcaaattgtgagaagtaagagtgaaagtttgagctcactgattgaggtcattggcttagggtcaagatcgtagatctgaggtcattcatgtcgatgttgtttccattcaagagatccactcttaacattttggtatcttatagacagatagtatatatatacgaaacataataatatacaattaattaaaaattgcaattaatcaaaaataacaaaactaaataaaatcaacaaccaaacatatacaaatattaaataaatttaccctacatatatatttgaaaatttcaaatatttaattttatatgttaagtttcttctatatttgaaatcattgatttttaaattatataaaaaaaactgaaccttgaataaattaatttgtatttatattataatatatattagataaatataaaacataaatattctaactttttttttctttttttttatatatataaaaccgttacaagatagtatgacggtgatcatacagttcaataaagcggaaagagtaacaaagcacacaaaagatttcaaagcatgacaactagggaggaaaaagaaaacgttttgaaaccaaattcgactatatggatttaaccaaacccacctcgtcgaccacgatttcctcgacctcgtcttcctcttcctcttcctccatgaccaatatttattgccttgttcggaaattgcaacggtctgtcttggagatgttttcctgaaaatgttgactttagattcattatgagatcctcatctgaatcctcagacttgtcagaatcaaccatgtttgaatcttcgcgcagaaccacatccgatgctaaatccagcaccgcaaatttatttgaactagaagctttgcggaaagaagtattagtactagatttgacccctgcagtagaggtagtgttatttgtagagacctttgcgggagtagccatcactttcatggttgaagaaagtatggcagtatttgaatctgaaatttgcaagacctccttctcaactagctgaggaccgacaaccacatctttacttgcatcagtaattgctactgatcccaagccaatgacagtttcttctttcgagtttgaagaggagagaaagtcggtgatagtacctataacttgaaggggtaaaaccgatgtgtcatcaacagttttgtgaaaccctttcaatatcgctgcaccattagaaacaatagccgtatctaatgccttggttgaagcattgacaatgctattctcattcaaaggagtaccattattacaagctgaaacgacagtcttctctaaacctagacccaaacacctagattatttatgtcccaagtgaccacataagctacacttagaaggcagccacgagtaaacgacatcaaccatagttattgagccacattcttcttttaaagcaaccctttgaggaaagggtttatcaagttttacctcgaccaagatcttagcttctcccatttgggttggatccagccaaggtctgctagttaacatagtctccccaatccccgaagcaatccatttaatccctttaaaagagtataactggttagggatgttcttgagcgtaagccaagcaggaatcattgtgatctccggaacttcgaaattggcaacgggtgaccaagttgagacgaacatcaaacaatcatccacgtgccacaatgctctctaaagaatccaacagcgagttgcctcatctggaatgtgaaagagataagaagactcactcagtttcttagtaaatattctacaatttcttccccaaatctaaattcataacagcatgaaccaatcctccagaaggagcaacgcattgatagaattgtcctacaataaactccttttgattctcaatcccttatgacaaaacatgactagggagatttaccaaaggggttccatgctctaagtaatccggcgtagtaactcgatgcaaattacgcttcgattgatccatctttgcagcccaaggataatcctttgaaaaaactttcagagactcatcctcaactgttcgagacctatcaataacctttgaatccttactatgatcaataccaacagtagtcatccgcttcttaccactagagaccacaagtgaaggccatctctgcgtagatgatgtgtctgttagcttgacctgctgcaagatgatgagaggtagaactgacgttgcaaggaacctgccaagctcctttgagagtcgacaccggagaggcaggggacttctctggacaacaggttcaattgtcggagttgcaatctcaatcaaactcttcactaacggtgctaactgagacttggtagtagctgaatcaattgaaaccgccggaagaaaataatcttgaatagatcgagaattactcaaccctattctagcagctgagagaatcaacggtgtatttgggggaggattaaccggtggggaagagctctcctgcgtccacctatgtaaataaggccacctagggtctggaggatcgacgacagcgacgactcctccgggaattgcttctgctcctttgtcgcgagatgaactagaacttgaaatcattgaaagactaggtaatctcgccggagaatagcagaacgagaagcaatcgacaaattcgcggtgattacggcttcgccggagagtagcagagccgagaacttttttctttgataccaaaaagaaaaataaatattctaacttgaaattgatgttatattcatagttagatagaaaatataaaaataaaattttttttgttaaattataagaaaaaatgataattgattagtggtacatatatattaaaatgacaaggattgtataaactttaggtcacataattaatattctatattctaatgatttatattatttttttagtcattacgtatatatatactctatatttaccaaaatattataatgttaatgtagctcaatggttgagtgtctcttatgagcccaaaggtcagctatttgattccccttgatcgaaaatttttcttcttattttctaatgtccagaacgacatcgtttttatttcacggagattataatggaaagtttcagccccgatcgtttggttgatggaaacataacgacatgccttgaatggccaagtcaacaaaacttgatcatttttttcaaaagtcaaactaaaagttaggatttaaatgtcttctctaaagtttatgcttttttatctcaaatttgaaagttcgcgatttttgacatttttactatttataattgtctacattagtatcaggcccggttattgggttgtgcaactaggacagatgaacatgattcaatataattttgacattttttcagtatttaggcccgtttgtattaaaaaaatttagaaaaagctcaaaaaatttgaattctgtttatatacatcatttttttttcaaactattgagatctggacccaataataaactaagccgggcctgattgggatagcgtgtattatgggtttgtttctttccaaatgagctatgtagatcttagtgagtcatagtccgttctaagaagaaatctatgcaataagaacatgacattctttttaaagtttatccgcacaatcttcctccttttttaaagtttatttcacatccaaaacactaatcatttataatttctactaaaaacataattttttggatgtacatacggtgaacgatggagttgggatggtaggattgtacgaaatgtaattatgacaagtggaattagggtgaattctatcttttaagatttgtttcacacaaattaagaaaataagtaaatataacaaatcttgactaaaggtttggactaaaggtctatgtttgacatttgaaaatggactaaaggtctctattttacatttgagaaagaaaacaaaaacaaaattgggtacccaagggtagtcttggatctcatcgggttttttcaagatccaaaacccattcgggtttattggattcatgtttttggttgacatgctcaatttgggcttgggtcgggctgggtttttttcccacaacaacatccctactaaatattatttcttcccttttcaatgaagatccttacattatgaatacaatacaacgttctctatacaaattctttatatatttttcatattttcttatactttaacaatgcgtatttgtcttgtacttttgtctttgagagttttaacccacaaataatataaatacttgagtgtgtaaatccgacatcaactgagacatgagttccatcaagtgctccaacacaaatctctaaaaaatgccaatatcgatcatcattcatcaaaacagggtttactcgtgtaaatttaccttcttgtggctttaatgtatccgctgcaaactttaaaagagcactcagaacatcttcaatcttttttttcactgtatccaatgatcgctgatatcttgcagctatatctcgaacattcttatcctaacaaaccatctcgagaagcatcttacataaagcttcaaatgttctttggttcattcggagaatgtcataacattgttgatctgatccatgcataagatgttgaacatgacgccatcctgctccaagatctgttctataatttaatctctccatagtaagtgagttaagaaaaccataataatcaccatcatcatcatcatcatcatcacccaacattcaccttctaaccatctgcaaaaaagtaactccccatcaaaagatattcagatttaattaagtgttaaggtcatacaaaaaaagataaattagccacgaccaaaacatggttaccaaaatatgaccaaaacaaaagaaagattcaaatttcatcaagtgttaaggtcataaaaaagacacgtaaagacaaagtgaaacttatgcatttttgcttcagatttcaacaagtgttaagtactaaaaatatgattcagatttcaacaagtgttaaggaaagataaatacaaaatactgaaaatctcatcaatcaacactaaaaatcatcaaggaaccttctagtcctaagctccaaaaattcaattttatcttcagccctaggaaacgttataaaacaatgtcggctggcttcatcaactataagattctcaactgttgctttgtgaaatggagaccacatcctaactccaggcaatccattaagcttctgtaatacactcttaacactatattcattctcactctccaacatctgtactgctatcctattcttcttgtcaagaactttggtccgtcttacaacagcttcaacagaaccacttagatttgagctaagcaaagaactttaacaaaaacccataaacataagatcaaaatagaagagaagagtcaagagaagagaaagcatttcttaaattttcaatctcacaaaacaaacctgaagaagtagatgtcgtcaatgtttcagcttgatgaaaaaagaaaggttatgaacagaggaggatcgtcgaagaacaagcttgaaatcgccgatagatcatgagaaaaagaaaaaatttcgatgagtagctttagccgcaaccattggggttagatgttttgtgattctcaaacatattgagggtaatgttgttattttccacttaaatcgcaatttaacgctgaattaaaacggcgtcaacaatttttagcagcagctacttgcgtttgccataatgtttggccgcatcgtcttgcgtccacctaacgaacatgcacatgcacatcgcggctgcgattgtcgcaagtagctgcggcgaccaaacgaacaacctaaacttaataaaacatagattagatacatttagttggtgaaacttaatagagaagcatgaaattttatggattaatatgtaattgcctaattaaataaagcaacttataaataggaagccattgatctcaagtatacctattttcactacactttctcgatacctaacttatatacttgcctaatctactcgtctgcttacagatttgttttggtagacggacaaccatagatgaagatacgcgtaaacactcattgttcgtcttggtctagcattgagttcaaaattgtagtggatcacttcgttgatatataaacaaattactacataaaatgattcacttttttagtgcaaactgaatgaatatacaggcaagtgaaatgaaagagttcagaaatggagaaaacgcttacttaagcaatgaagtgatgggagttgatggaaaatggaaaatggaaagttaaaaacagtgaaattccattaacttacctccgtttatttgttcatcgtgtagtgtagtatatacgactctttgactggcttctttttctacacaagcttaacaccgctatcgtcacacatcttcaacgcttctgtgttaaaaccaaacaaataaagcaaatcgattaggaaaagaatcacataacagaatcacatattgtttttcattggcattcgctttgatcaaaatttcagtttcaattattataaattggaaactgaagcaccgatggagatgaggcaatcaattatgggaatcttagtcacaatcttaggatattttatataggaaattatgagacgtttctactcataatttaagtgaggagcgaaaacatttatggaggagaaataacacaaggacgtgaaaacctaatgcactaaaaaaaattggatggataatgtggcaagatttaagagaagttcttcttatttgatgagatggacaccttaactgatctcaaagaattc

SEQ ID NO: 1467 - DNA, 110714 bp, Arabidopsis thaliana
ttaggatattttatataggaaattatgagacgtttctactcataatttaagtgaggagcgaaaacatttatggaggagaaataacacaaggacgtgaaaacctaatgcactaaaaaaaattggatggataatgtggcaagatttaagagaagttcttcttatttgatgagatggacaccttaactgatctcaaagaattcattttatcagtagtagattgtacaatataaaatcctagttaagaatccgcactatgtgcggaataaaacgaataaattattatgtgtaaaattattatgtgagatataatatttgtttgtatataacaaaatatgtaactaaagttttttgttttatttaaacttacgttgatttcgtgtaagaatacgttctacccatgaaatatttaaacctgatttttgaaatcttttgaatttaggcggtatgttaaaattctctataatcaaataaatataattgactcaaagattaaaatcggaggagaatgcaaattgttaacatgtttatcatatactgtaagtagtcatatgatatattgttcaaaatcgtatatttttttaatggttttgtgttaatgattattgaaaaattaactctaatgccctctccttgatgccccttttcaactctacccttttttttgctattttcatttctaccccatctaatagttttatccccaaactaccccatctaatattattattcccaaactacccttaatgaactacaaacacttcatcgacctaattttatttactctttctcttgttcttccttcgtcggaaattgtttaatttgtcaccgttgcatcccgtcgtcgccgtcggagattgtcggattcgtgttgtcgatttcaccgtctcagtcttcattcaatctcttgcttttcccaggtttgtttttcgaatcgatttcgaatttgtaatgttagcctaaatgtctcgatttcgaattggtttattcgattttgttgttgcttatgtgaattcgatttctaaatcatattatctgtcgtaagtaagaactctttcaaggagaaacagattggttgagaatcaactctaaaccaaagagtttatcctttagtcatcactctcttctgcatgaggtagtggaaaaatttccctgaaaattttacacccctctttgccttcattcttggtcccaattcaactaaagaaccaaaaaaagaacttctaatcttgtcaaataaactctcgcctaacgcttcctctactttattaactaaaatccaatccgaatgttgctgaaccgtacccattgcaatagattcgttaccttctttgtagatctgttcaggcaatgtaaggatttcactctctgaatccatctgcgaaacatgtacaaaataaatcagattcgaactgaaatttagatctaaactattgtcagatccactataaaatcgagagtcatattaccgtcggatttggcgatttctctgtcggatctatcgatctccaaatcgaaggaaactcttcgtcggatttctctggggattgtttctcgttagagagaaataaattcggcgatagatcagaattcgtcgtcggaaagaaatgaattcggcgtcggaaagaaattaattaggcgtcggagagaaatgaattcggcgttggagagatctgaattcgtcggcgaagaggtttgtcggagagaactgaattcgtcggcgaagaggtttgtcgaagaggaagaggtttgtcgacaggagaaataaaagtgaaactctaattattcattaagatcaagacagtaattttccacactagaaggggcagttttaaaaatggccatcaggaaagggtattgttgcaaaatgtcattagaaaaagggacttttgcaaatctcccatgattattaagattactcatgttaggtgttcaattttgttaattaaataataaattgtaattttgtttaagggcatctctaactcatccctatttttgtctctaaattctattttttgtctctttttcactccaactcatctctattctcacctctattatagagatctctatttctttctctatatatagagacaaaaatagagatctctattttttcctctatttttccttctaacaaatagagatctatatttttgaggaaccattggagtaaaaatagagatctctatttttgtctctatatatagagaaaaaaatagagatctctatttgttagaaggaaaaatagaggaaaaaatagagatctctatttttgtctctatatttcgaagaaaaaatacagacaaccattggagatggtctaattagttgagtaaaaatatgtggttgttgcactacaagaatattgtgttttaatagcactataatatagcgtttatgtcattaatgctattgttatgtaaccactttattttaaatagcgtttgtgcataaagaaacgctatgatataataaactttaagtcacatttttataaatcaggttttcaatagcagatataattaaaaacgctatgttaaagttaggcggtaacctaaaaaattagatcccgctacttagaaaaaattcattctttctgggatcgaaaaatccccaaatttgcaaacctaattttttgctcgatttcttccctctctatcaatttgtctcgatttcttccctctctatcaattttgctcgattgcaaacctaattccatctcagtattcttttccaaccaaatctagctcgctcagtcacattatctcatctccagctcgatttaggaagacgagaagacaatatctagctcgctcagtctcgttcaatctaagtcacgttcttcacgttcttcatctccggctcgatttaggtatttcactcttatcctctattgttatcagatctcctactctattgttgtgcatgcttaactggaattctctttgataattgtatacaccttccgtcggagtgtttgtaccatggataaagcttgggtctggttaccaaggtaagacgttgctctcgttctccttactcttctttaatctcgttctcgggctgaaaaagtttaagttttctaaaagaatttcaattttgattgcttacaggatttgccttgagtatgaggaaggagcgactaagtttgtatttgattcagcaagctgtttgggtaatgtatcagatatgttttgcccttgtgttgattgccgcaatatggttcatcagtcaaatgagacagtgttaaagcatctagtgattagagggatggatattaagtataagagaagtaagtgttggagtaaacatggggatagaagtaacaatacagcagaacagacgtctgaatatgaggcttatgatttgtttagcacagcttttatggcaagtgaggagaagctaccatcgccgcaccataatgttgaagagtcagaaacaatggacagtaaagaagaagttgagttcagaaagaagttagaggatgcagaaactccattgtattcgacttgtctgaactacgcaaaggttagcgcaatcaagggactttacaggataaaggtcaagagtggtatgtcagagaatttttttgatcagcttctgagactttttcatgatatgttaccaggaggaaatgtgatgcctaagtctacagatgagatgaagagatttctgaagatttttggttttggttatgatttcattcatgcctgcagaaatgattgtatactcgaccggaatcaatatgaggacttgatgagctgcctaagatgtagtgaatcacgatgggaaaaggacaagcatacgggtgaggagaaaaaagggattccagctaaagtgttgaggtactttcctatcaaagacagatttaggaggatgtttagatcaaaacggatggctgagtctttgtgttggcatttcactaatgctagtgaagacggttcaatgcggcatccagtagactcatttacatgggttcatgtcaatgagaaatggccagagtttgctgcagatccaaggaatcttagactaggtctttctactgatggggtgaatcccttttctatccaaaacaccaagtacatcacatggcctttgctcttagtcaattacaatatggctccaactgagtgtatgaaagcagagaatatcatgctaacaatgttgatacctagaccaaccgctccaagcaacaacattgatgtatatctacagccgctgatagatgaccgaaaagacttgtggaatgaaggtatggttgtttatgactcattcaagaaggagagtttcactttaagagctatgctgctatggagtatcactgattatccagcattaggtacattagctggttgtaaagtgaagggcaagcaagcatgtaatgtttgtgggaaggatacacctcataggtggttaaagtttagtcgcaagcatgttgatatgggcaacagaaagcatttgaggcctggtcacccttacagacgtaagaaagtgtggtttgacaatacagttgaggttggtattgcaaatagaattcagagtggagcagaaatctttgagtgccttaaagactttaagaatgaatttggtagatctttagagaagaaaggcaagagaaaaaggattgaagcagatgatgatgatgatgacttgaacgcaggtgatgaatatgcagaacacgatgatcaatggcggtggaaaaagagatcaatcttatatgagttagcttattggaaggttagtagtcattacctagaagtttttaacttatattgaactctaattactaaaatgtcttactgacaatactttatgaactttaacttggcaggatttacctgtgaggcataatatagatgtcatgcatgtggaaaagaatgtctctgatgcactattatcacttctgatgcatagtgtaaaatccaaggatggtttgaaagcaagaaaatacttagaagacattgggattcgaagcaacttacacacagagaaccgtggtaagagaacttacttgccctcagctgcatattggctttctaaggaagagaaacgaaagttctgcagaaggttagccaaattcagaggcccggatggatattgtgccaacatatccaactgtgtgccagtagattctaccaacattggtagtatgaagtcacatgaccatcatgtactactacagaatctgttacctgtggcattaagaggtttactgcctagaggacctcggattgcagtgaatcgtatcagcaattacttcaataggttgtgccaacgtgtaatagatccagagcagctggttaccttggaatctgagtttgttgaaacaatgtgccagttggagagatactttccaccatccctttttgacattatgtttcatctgccaattcatttagcaagagaagcatgcttgggtggtcctgtacacttcagatggatgtatccgtttgagaggtatgctattagtatgatgtctctttaaattagtatgatgtctctttaaattatgtctatattaacattttgtttccattgtaggtacatgaagaaacttaaggcttatgtgaagaattttgtaaggccagaagcttgtatggctgaaggctatttggctggtgaatgcatagcattttgtttggagtttctcaagaaatcagttcgagttcaggaaacaattactcgcaatgaagatgttgagacagatggtaatgtccttgaagggagaccactgaataaagccatagagaagactctcacagataaggaacgtgacattgctcatcgatatattctattcaatacaccagtcatggatccatatattgagtaaatgcatttctatttatcttcatacacatgttgaactttaaatctgtctcagacgttaccttaatggtttgaaggttgcatctggaagagctgcaagctactaatgcaaaatgtgcaaaaaatgaaactcttttgtggaaatattatacagagaggttcccacagtggatcaaagacaaggtaatgttactgaacttgttaatatttctggtttctattacctctcaatgattagtgtaatatttcatggcagatacaaagtaactcaaaggaccgtctactaggctgagatggcttgctttcggaccaagacatgttgttcaaactcacaagggttatataattaatcgccatcgattccatacagatgatgtgaagaggaaaacacagaatagtggagttacttatgaggcgttttctatgtgtagatctagtgctaaagacactagacagatggccgacatagtaacattctatggagtgattaaggagatcttattgttggattaccacatgtttcacgttccactatttaggtgtagttgggctaataaggggaatggagtgaaagaggaagacggtttcacacttgtcaatctacatatgaaccaggcagcattcttaaatgatctgttcattctagcatcgcaagctaaacaggttttttattctagagatgatgacaattctccttggtatgtttgtacgagggcgccaccaagaggatactatgagcttgaaacagtagaggagtttgtttctgcaccaatatcagtccagccacttaaagatttaggagatcaatcttcagatgacgagagtttttatgttagggctgattgtgaaggtgttctagtagaggattaaccaatctgtttttgtgtttcaggtaatcaaatacaatgaaacctgttactgaaatccgtcgcagtaaacgacaagcaggccttgatgttactcttgtagtgtcaatgaagaagaagaaaaggatactgtagaaagagaagtcggttacagaggagaatgaaatagataagactgcagagattggagaacaggtaattggcgatggttccaatggagaagaagatatcagagaaaaggatactggagaagaagaacatattggagaagaagccaatggggaagaatccaatggagaagaggagaatggagatgaagatattggagagatcaatccacagcaggaatctcctcagctagaagaagaaacaatccctaattccacagcaggcgtctccaacacttctgaatcaaaaacacaacaatgctcaaataaaaagaggaaatctagaggtccaactagaatgcgcaaagtggcaaagcatcttgaggacaaggttgaagtagaatttagtgctcttggtgagcatgttggtaagggatcagttacactctcctatttccttggtcctcttgtgagagagcatgtgccagttctgctagatgactggcgacagcttgattagaggacaaaagacttgatgtgggaagaaattcaggttatcactatacttgataatgtattgattttgcaagttctgctgtgagtgttgttatatctaaacttgttaatgtttggcaggggaggttcaatatgaaagaagattggcaaaaagatgcaatctttagacaaatgggtggtttgtggcgggctgctaaatctaagcttgttagtaaagttagatctgctaaaagcaagtctgctctacaagcaatgaagcctagcaacatccaatttacatcatcttggaacagttgggttaagaaaaagaacaatacagcttttaaggtaattgttatgtattgatccataacagctgctgttttttactcgagtttttgtccactaactcattatgtctgtaggaacgaagtgaaaaattcagaaagctgaggaagaatcagattcctcacacaacaagtcaaaaaggaatgactcgattagctgatgagatggtatgcatttaactgatcttgtttctcattgtgtttgatagttgtattaacaatttactcatgatgaacttgcagaaaaaaaacagttctgatcctaggaaagttactagaaataaggtgtggatagcaggacatacccattctgatgggagacctgtgagggaagaatttgcagaaactattgtaagaatcatagtgtcttatcttcttaaggttcatttaaaagtagtttctactcagtgtgtattgtttttgatttcaggaaatgatcaagacaattgatagtgaaatggactccaccacatccacagataatgttagggacgatgtcgtgagtcaggtactaggaaaagacagacctggaagacttagaggaatgggtagaggcgctaatgttaccaagttggctttcttacagactagagactcacatgtccagaaacttgaagctactcaagcagaattacttagcaagattgagaatttgcagaatgtggttagtaacttagctagtaaaaaggtaaaccttttcaactgatcttgtttcccattgtgaactcttctgttcaataagattagatatttaaaaacttgtttgttttcagaggcagaatgacaaagtctcgatgtctgatttaagcaatgttagcaaaggaggaattaggtgccagcttttagattggtgttttactgaagaggtgatagttggtgaaggagaattttgttcaagtgaacaaacttataagattggtcgcataccattaggtcgtaatgcagctgctgtacttttgaagtctgcatcagtcatgagtgcatctgtctggagacctactccaaccattttcacacttggtgaagctgtaggaagtaaaattgcatggcccgctgacaagataatattggatgaagatattgacttgacacaacctagcaatgtgggatcagaggtaaattagaactccttctatgttcctcttgcagtcatattgattagataactactatagactctggattatatgcatgactcattagaaagcggatgctaccattggaagagttcacatctatcaatattggaatggagatgatgaattgattgctgaaggtttattgttgtcaactgatggtgaagaattggtagacggtagacctctgggacatggtgctgcagccattaagattgtgttggtggttaaacctgaagcttatttatggagaccaaatcctccaatctcattgatgagggatgcactaaatgagaccatcgcatggcctattgataggttacacctacttgatctacctgcagcagatgaatcaaccagaaaaacacatcgagtaagtttttaattaagttgggaatattagagtagcttcatgtttagattagaaaatgggaatattagagtagcttcattgatgtgttgatgttgttgtgatgttgatgttgttgtgatgttaatctgatgaattgttttaaattttttgttgttagagtactagtactcccagcactggtaatagcagcaaaaggttcgaaacaaaagttctttctattggatattgataactctgggcagaaagttgcagtaggttgtgtgtcttcaactgatccagcagagaaggtccatcacgtccctttaggttccagcgttagcaaggtctgggtagaggtttccaaggttgatggtgcacgagtgtggagggcaaattccgaagttacattcatagctgatgcagtaggaaccacagttgcttggcctaatgaaaagattgtatttgtgtgacaatattttggggttttcaggaagtcttaagtacaatgaacttcaaatcttggtgtgtattgtgtaatctaatgttgtatgtgacaaattcataagtattttcattcaatataatcgtaaattttaaatttcgtatcgaatcaattatagcaagaaacaaaattaaaccattacatttgttaaaatgctatattaaaaataaacataacaatataaaaacgttgttaataatctcattataacaatatgattacgctattaaataatatttaattgcacagagaaaaccgctattgtatattataatataatagcagacaatataaacgctacctaaagtgtcagacctacgatgacgggcacagaaatagcacttaacaaaacgctatgaaatagttagatagcgttattcgtatgctaccaaaagccaatattcttgtagtgatggcaaattgatgtaaatattctagtaaaaaaggacaaacaattaattgggttatggagctttcggagcgcgacatgtcatcatgacattcttgttaataacacgtaagaataaaatttattttcaaaatgtttctctattaatatagaacaattcttaggttcaccccttaggggtgaacaaacttcattcacccctctttaataaccaataaaaatacaataatacgtcatatcatactatatttaaaaataaatcaaaattaaaattagaaaacaaaacaaattaagaaaataaaatctttagaaaccgaaaacaacatataattctattaactttaaaatctaaaccctaaccactcttttataaattcaaaccaacatataattttgtttaattgaaaaatctaaaccataaacctcatttttataaacccaaaccgacatatagttttttttaattgtaaaatataaaccctaaatattttttataagcccaaaccgatatctagtttcatttaattttaaaatctaaatcctaaccactactttataaatccaaactgacatataattttgtttaattaaaaacactaaaccctaatcctcatttataaaccgaaaccgatatataattttgtgtaattataaaatctaaaccctagtccttatttataaacccaaaccgatatacaattttgtttacttataaaatctaaatccaaattcttatttataaacacaaacctatatttaactttctttaattaaaaatatactgattttgtttctttaattttttttccaaattttagttttaatttttttaaaataaagtataatatgtcataatgttatattctgattggtcattaaagagagggtgaatgaagttattcattaatgtataggggatttgttttctgaatatcagaaataataaaatattgaaatcataaatttgttcttaagaaaacataaaaataccatatgttttccgccatttaagtccattttttaatttattctttcaattttttaaaaaactattttgacattttgtcagtgagcatttgaagctcattcttatagttcacctacgcaggccaggatagcattaccgttatatttccaatatacatcagtctttggatttgaatggtgacagcatatttggcagtgcgggaaaagcggatttatactgcggtacggtaaaactgcggtacatgcgggagaaatttatatgcggtacaagtgcggtttttatagcataagcggtacataataatgtttgattggtaagaaagtaatttgtggaatttgtttgattggtaaatagatatttaagataaataattgataaactaatatattagtaatataaatttaattataactataaattttcatttattgttaataaaataatatttttatctagtattttttttagaaatttgttatagttaaacctataatttctttttaaactattgagtaaaaattgactaaaatgattattttactaaaaaggattattttataacttgttaattgttaatttactttttgtaaactgttgcatcaaatcattcatgtattaattagtggttgttattaagcttttttctatttttataaattttataaaacaaaatcactttttttctttgtctaagtgctgattttgatttgaactactgctcagctaaataaataaatgcgttttcattaattaaagttcttatatttttttattttttaaaaaataacacaattaacaaaataaatgtgattggtaacttattgaagttttccaatactactaatatatttctcaataagaccatctccattggtagtttcttactgagaaactctatataaaaataaatcaaaaatattaaaataattttttttaaatcagttttgttcagaattgtttctgaaatgagaaacttggagaaactttctctctcttccacatgtcaccttcttattaatttcttttctttgttataaataaaatcatctatactttataacatcaactaaatactttatatgtttgttaattttttttttttacttttaaaattcataaaattaaattatctatataacaagctctattatgtatatgtttaaattatatactaatattatttaattggtgttagttaagcattaaacataataataacttatagatagaatatgtttttttaattagaaaacaaacatttaaaaatttctatttttattttgcaatattttcagattaatgtaaaattatgattttagatatatgtatttaaaatttaatcatcaataaatcttttaatttctacttatcttgcataagtggtaatccattaccaagtgaaagacttcaacgtttaattgaatcgatattgaattttctgtttaatttatatatttttttctatttaatttatgttattatggttttatatgtaattttatgtttaattgatatatttttattatggttttatatgtaaagtaatgtttaattatgtttagttatggttttaaaaataataaaactatttaataatataatttgtaaaaataataattgatatgtttgaaaatattatagagatattaaatttaatatatgaaaaaagaaatataataatattttaatgttaatgagagacctataaaaatacctcaccaataaaagcgcaattttagtataagtttctcaacttaaattaaatataaaaatataaataatatattatgaggttatcatagagtatctcacctaaaggcctttaattataacattggcaccgaccgagtcaacgtaaaacattgactgaagaaagaaaacgacaaaacttttcaaaacggtctttctctgtaactttacctctctcagatttttttctctcaatctctccaatgtcgaacacggcgggattaacgattttcgacggtgatctacttagatccatcgatctaaacctaccggaacaccaacacagagtcaccggagctcaacttctcgagatctctgaatcaaaagtttctcaatctctctctggtctctcactaccaccacatctcaaagaaacagcgatttctcaagtctccgatggagatcacgtcactttccgtcgtacgatgttcaataaacaacaagcttctgagaaactcggagttttcttctccaccgtcgccgatgctctcaaaggtaccgtagaatcgcttcacatatattaagtctatagaacggtttatctaaaccgggaatcaattgttgattatcatcggttaaaccggaaccctctcatatctattaagaagaataacaagtataggttttggttatgtgatttatatagatacaccaattgtggtgtcaatattggatgggactatgttgaagatgtttttggaggatgaagatgattttgcaatgttggcagagaatttgttcactgatttagatgaagaagataaaggaaagctttgtaagagtgagatacgaaaagctcttgtacatatgggtgttgaaatgggtgttcctccactctcaggttttgtttgttctttctttgctatgtttttgtttgcattctagcagtattagcagtgtgggcattgtcatttggtttaggcttcacagagattttctagcagttaatatagtatctactgcaacaacaatatttgtttagtatgtcattgtcacggaattgtaaccggttggcgagtttatgagtttatttcgtgagctctgaaatgaacccttttgaaatcagttttagcagaagttttctactgtgacatcaatcttgtgtagtatgtcatgtattattgctttttgtctttgtagattaggattcaattttatgctgcctttggatcattttattctcattgttgtcttgacatagtgaggctttgtttgaaacagaatttcccatattagatgatatcattaagaagcatgatgctgatagtgatgaagagcttggacaagcacaatttgcagaactactgcaacaagttctacaagaaatagcagatgtccttcatgagaaaccaataactattgtcctaaacgttgagattttcactggatcaaggattcgtaaggttagtccactctcttttgcttaagatacatgttgttcttaagataaagcatggatctttgaccaactcgatcaataatatttctcagattcttgctgatgagaagacactcaagtgtcttgtagagaaaacgattttggaagagtcgaacggaaaagagagccaaggatggttaaggacgttgataataaagaatgggaaagagttaggattgcctccgttatcttcagaaaacgaacaagtggctcttctctatgagaccataatttctcagttgaataacaaagagaatgcttctacaaaagaggagtttatggatgctctaaaggatatacttaagaaatttgaggagttgctcgaaacaacaccggtgttttctgctatcaatctctagaagactagaacaagccattattctctcgttacagagaggcagagagagagagcttgacaaaatctccgaggtgtattattgtatatctaagaatattagtcacacacacacccattaactctgccatatagataggcacagtaaggattctgaagtataaatggtatgtatgattattgattatgaaaacattgtaattagcatttggacaaaactattgttgtgtaagatgactttttgagacagaaagttacacaggcgttggtagatcagagtcgttttgctgcttgaaatttaattattcaaaaaagtttgtaacatttgggaaatgaaccctggccttagtcacatttaaagatacccataccacttgagcaatacttactgagagatacaatcattttctttatatacatatataagtatgtatctctatagtacagtttaagaacatttgttatcgggtgggttaaattgtgatccttcatattttgtacctaactcgataacaaatttataatcatatttttctttaaatcgggttataaaaaaccaaactcttacaccgaatattcgatattcaacaatatagatatttagaagatttggttaagattctaaattatgattcttctatcatttttgtttgatttttttctaagtgtttttgaatcatcatataatatataaatttgagaaaaaatattgaatctcaatatttttctgcatacattgtgattctccaaatttttaaaacaaacatatattacccaattgatgaaaaaagtttatgttcaacggggttatatgacgagagagatttgaatcaatattaataaaaatttaaaatattattaacccgccactataatacggattaaatcctcattttattatttggtaacatcatcaatattaaacatatcgaatcatcgtgttttagataaaaagaaacccaaattgtcatatgatataccgatactttataacaattgtaaaatataaaatataaatatcttataaaatgatataattggtaaacttttatatataatacataattattaaactttaaaaattaaatcactactattagaaaaaaaacaaattatatgcggagtaccacatattaaaatttagtcttctatttgtatttgtagataatcacacatatatttatttatatatttttactaaaaacgataatatacatataagtacaattatatacatatatatatatatatatatatatatataacggttgacaaaattatatataatgttgatatgtatatagcaccacatacttgtacatgttggaactaaaatgcactttgcaaattgttggggtccaaaatatcctttttacatggttggcaaggatgagatattatggaatttcaagatattcgtatataaccaagttctataaaaattaggttaaactaattaaaataatatatcttcactaggtaataatttagttaatattatatattttattattaaaagtttggttttaaattttagtaactcatacgatcgtgatacttgtaaagtatatcgattggattttgacacgtgttaaaaaaactaaaacaacatacggtaagttataattctataaggaaatggataaaataaaataatattgtaaatatttttttcctaaaatgaaaaaaatttctttgaaaatattatgttgatattcaagttaaaaaatattgttttgttattagatacaggtgaaatgtatggatagaaccaaaaatattgtgaagtcgaatcaacatgatttgtttgctttagcaaatgaaagtacatgctaactggttgtggattcataggtgtatagtttcagagttgttcatttttttaggtaactaaaacactggaaaacgatgtaatcagcaactattgagtagacatgaatatgacccaatgcctcctctagggtacaaaaacttaaaacatcccttacacctacatcaactcgaggaagaccaaagattgatggaaattgttcttggcacaaaaatgagacatatttatttgaatgctttctatggatctcataattttggatgaatcgtaatgcggcgatagtgttggaggcaaagcagacatgtggatgctctgctttacctataaatatcccaaatggaaaaaggacaatagagatcctccaacccaccaagaaatctcatccaacttgcaatgtcagtagcaacaaagccccaaaacataagatgtttaaattgatccctaatctggcctatttgatagcgccacaaagcgtttctcattaattctgccaattgctgtagaaaaaatcatgtgttttagttagttcaaaattttaggtaaaacatattgaattaaatcttcttctttcaacaaattaatgttttcaggatattagaagagaaattaggctgtgaaagaataaaagacaaatgacttagagatattatttcctttcatttttggtgggttgttgaattcatttttttttgttttaaagaatattgagagattaatttaatatatgttttccattgtttgtgcggcttgccaaaatgagaaagttaggtccgttggtgtgattcaacataaactgattaggtagtggatgcacaataagtgctcgggcaagtgtgggctaacctatgaggaaagaaatatggttatcgtcaatgtcgcaaaatcttgtccaaaagagagatgtctgagagtgttgtggaaggatgtagatttagagaatatattcttcttattgatcataaacatgtgtacaaagtatatatagagaggagattgtcgagataaacctaaccgactatacatgttaatatacaaactcacaaagcccatataatctaacttagcccaataaaggagagtaaagtgaggtgttggtggaaactaattcatctctaaaaatctggagaaatcggacaaagatgatgaacttgatgatcaatatagtttaggcttttagggaagtgtgaagatgaacttgatgatcaaattttagttaacccaagttaaatttgggttgagttaaatgcttcatttgcttttgcatatgatataaaaggtgatttgggctcatttgagaagcgacacgaagaagagtgagagcaagagcaaaaccacaacaaaaaattgggtgattgttgagttgatgatttgaaatatatcgattgtcttattttagatgcataaatgaatatttgtagtatgatgctaacgtcaaagatttttgaaaaaacactgataacatatatattcaaagaagctaacaattgagccgaaagttgcttaattgttttgagattttactatgcttttccttttgatttagtggtttttttcttagttttggattaagtttaagctttatttcctttgatattatttaaaataataaaaaaacattatatgttatgttataataatatcgtccttatctcatatttgttttttgataaaatgtatattcaaaatttaaaatagtaaatacgttatttttcggatcatctcgagtctaagaccaaatcttagaacatggataaaaatctcaaattttagatattttgctgatcgggagagttgcataaaaaaagcaatatataaacttaaaaccttatgatttattacgtgtgacatttttgaccgaggaatgggataaagaagtggatggaagagaaagaatggtgagtcaccgtgagtgatccctaacctctagagatgtgtgaatagatgataagatgcaagaaaaaacacaagccacttacttgtactggtccgtgagaggaccacgacatcaacttgactatgatgataaacatacatactgtgaatgaaaggaccacaataatatgataacagacttaacaatgcaagcaaactttttcaactaaacataaacaaggattagcagaatagaaggaaccaaaatccaaaacacttattattgcttttttaataggaagctacctaaaaatatatctaaacattttgctgaacttaaaaggccatatttgagcttgacttatactttggtgaacttcactcttttccatcagccgcgcggagtgagcctagctgaaccggtgcttgagttccaaccacctttgatgacccgtaaagcgacacatcgcttccctttgctttctctttctcgatctgttcctttatccagaagtaggttattctaagcccctcctgtttaacgattatggtcaaaacaatatcagtaataaaagaattagattattatcttgtctttgagctacttaagtaaataatgttggtaccttcaatctcatattaggagcccaaccaagcttttctttgatcagattgttgtctgagttacgaccacgaacaccttccgggccaggaatgtggtgaattggaagcttcttttcctcaaagctgagaaccatctcagccatctcattcatgctcaccatctcatcgcttccgatgttcaccggctcacggaaatctgattttgtcaacctataaaacaaaaatgacgaaaatatcagccaattacgtctaacatacaacttcatcaacatcaggagataccctcacctgagtacaccttcaacacactcatcgataaaggtaaaagaacgggtctgaagcccatctccccacatctcaaacctatcagtggaagtctgagccttcctacagaaagcagctggagccttctcccttccacctaagttgatccaagcaaatattaatcccaatagtaaacaactaatcattcacacaaagtacggaaactgtttatctgtatactacctttccatgttccaaaaggaccataaatgttatggaaccttccaattcgacactcaataccaaaatctttgttgtaatgcttacacaactcctccgtagcaagcttctccaaaccataagcatcttgaggctatatcagcatcaaaacatcacataagaaaagactcataaatctttagcaagaacatataaaaaataatcacaaacctctgcaggccaagcatctgactccttcaagctcacattagtagtctccaactgcttaaactctggatagatacaagcactcgaagcataaaagaacctaaagcaaacaaaaaatccaatctttttaacttgttttaagaaaccgtaaactgcgaaaaccgaagaaaacaaaatctaactaacctcttaatcccattgatcctagcagcctcaatcatattgaaactaatcatagtattattatacataatcacagagtgattactctggataaaacccataccacccatatcagcagctaagttaaaaacatgatcaactccttcagtaactttgagacaattctccataaccctaagatcaacaagatggaactcatcacagaacatgtcttcagtcatgtgttcattctttttccagtcagaagcaatcacgtaatgaccttcgtgcttcaaacgacgagcaatgtgagatgcaatgaaacctccagctcctgttattgatatcttgagattctcagatggccaatattgctctctttctagctccttgtatgtgtatgctccatagtctgttccattggtagttcccattctacattaacaaaacaaatctgttaaaaacaataagatctctcatgcaaaagctagacatcactgtagagtcctaatttgtgataaatttctataaaaaagatttgggatttagagagttttgacagaggtaagattattgatgcattggattccggcgtaagttagcgaaaaacacaaaactgcgaggcgtaagttagccaaaaacacacaaaattgcaaaacaaatctgttaaacacaataagatctctcatgcaaaagctagaaatcactgtagaatcctaatttgtgattaatttctgtaaaaagatttgggatttagagagttttgacagagaatgcattggattcggtgtaagttagtgaaaacacacaaaattgcgacgcttaagttagccaaaaacacacaaaattgcaaagaaatatgttaaacacaataagatctctcatgcgaaagctagaaatcactgtggaatcctaatttgtgataaatttctgtaaaaagatttgggatttagagagttttgacagaggatgcattggattcggcgtaagttagcgaaaaacacaaaattgcgaggcgtaaattagccaaaaacacagaattgcgaaattcggatctcagagaagttttgattcaggaatctgggattttaaaaccctagattagtggaattgtaaggaagattggatcttttacctgaggaaggttttggagagttggagagatcgaagagataatgcagagaagagtcagagatttgaggaagaggaagagtaaacttgtatttatagagagagaacagaagaagatgaagaggaagatggagagagcaacaccactcgttgttttagttttccaactcctattggtatttgtgcctctttctgttaaatttattttataactaataaaatccttcgaaaaaaaaaattaatacttcttttgtagagagttttttagaaaataggagattttatagaagatttattactttttattaggtttgatgatttatattatgcatattatttttactatttgttgaatcgtatttagatagataataagaaatgttttagtttagaaaaaaaaaaaaactaaatattttctttattggtgcaccaaacaatttcataatttttttattttctagcttcaatatataaaaatatttgtaaataataaatatatgtatattctatatattaattgagaagtttttttaataaaatatttatattggcgtgttattaacgaaaccgtcatgttgtgattctaatccatttaaataattgtccaaattttactagattattacagatttttcaattagtcttattcatacatatatataatacacattaaaaggaaattcttataaaattcaaataattaagcaattaatctttaaataattattattttgagaaaaattactttaatttttgttattttctaattaactaaaacactatttaacatattttgtatttgcaaataatagtacatcttcatatattaagaaatgtgttgtaataaatttttattaaatatataattattttgttattttagtgatatatactgtattgaataattataatgtacacataaaaatataaaatattatttatgtttgtttatgacataagagcaaccataagtccatttttggagtttgaaactgaagagtaaattagaaaaaaaaatcttaaattaaaatataatataagttagattgatgttaaaaattatttatatagttatagtatatatataacctaaactatattagttggttgaaatatttgaaataataatgattttagtagtattttaaagttcataacaatcaaacggtcgaaccgagatcaaactgattcgagttaatggtcaggtagatttttattaaacttgtaaactatcaaaccgtatataaaaccattaaaatgattaaatacgtttgcgagaaatataaatatttagagataggcgtaattctcattcaattttatcatgttccattatatcttactcgttctccaatttatttctcataagagaatgcatttctaatatgagaaaaaatttgtattccgattagaaacagaacgtgatggaagcaaaaattctctatatcctgtttgggacaaacacaaatataattcatgtatatttttatatgatatgatataataaaaatattacaaaattaattgacttctttcttcttattgtttaatattttgttcataaatattaaattacatttgtttatttttaaattttaactattataaagcatactataataacatttattattttgagcatttttatgctgtataaattgaaaacacatgttacatatttgattgcaaacgttaatttgcttaaattgtaacttgttgtaatctaaaagctatgtttttatcccgtgttggctccttctatgtcgttcctttttcgtcattcctattctcgttatattacattaaatatcatgttccgagttcatttttacttatctttaaacacaataccagatacagctgtaacttttggggattaacatatgctttgttaaaatttgtaaacataccataaattaaaacatgaaaacaaattgaaaaaataaatgatctatcaactataatatgtcatactcatacatttgttcttgtgtacgtgcacatatatgaaaacaaaattatatttactatttaatataaataaataaacaccgacttgatatattatctcaaatccagaaatcctcttgttgatataatatataattaatcaaatatatatatttgaatttatttgataaactttcttaacttcaagaaacaaatcttaacaatatcataaaactaagagatagtttaatgtgaataaatttagagaattagtttgaactaattgcaaaaactgtgtaaatttaaaaatagcttgtaattagttaaattagtcatcttgatctaaattcaatagttccttaaatttgcattaaaattacaacattggtatttaaatttattttaatgttatttcaaaaagaaaataatcaattctagaagaatgtgtattccaaaatcttgtaacaatttgatacaaaataaaataatttatttgatttgaaattgaataatttatctggctctaaataaaacaatcagatatattaattattataattctttttaaaaaatatattaaaaatttgggttaattatatatttaaaataatgaaactacccgtttttaaaaacaaaaaaatatattctaaaactttatatcattgaaactctaattaaatgttaaaatattttaatataccctggaaatattttctagatatttagaatccaaaaaataagtttttgaataagctgtattttaaatgatagaagtatttcgtttagattatatacgacaaatataataaatgttttttcatatctgaaaaatcataattgaaaaatcttttttgtcatgtatacaaatgagatttaattagcatagttttgttaaggaagattttaaaatctaaacgaaatgataatttgttattagattgccatattcgaaaatatctaataatatcttacgaaaataatttagtttacatatatgcatttttcaattaaacatacaatatatttgcatttttaaagatatttctatattttagtagttgttaatttactaaattactcatgcaaaaattcatttacctagttttaaactagggagatttgcaaaactactatttttttactacccttttgcaacaatacccttttatgttgtccatttttaaaaataccctttcctttgaataaaatgaccaaattaccatcatctaatagaaacatgtaattggaaactgaacttttcccgccaattttttggcgccaaaatttgtttttccggccaaaaaaaaagtttccgccaaacttttttcccaccaaaaataaaaaaaaattcccgccaaaaaaacaatttcccgccaatttttttttccgtaacagatttttcctcagccaaaaaatgattttaaaaatccttgtaaatattttttggcggcaaatagatttacatgggattttaaaagggttttgaaagatttaaaagagattttaaaaaggttttacaagatttacaagagattttaaaagagtttttaaagatttacaagggattttaaaagggttttaaaaaatttacaagtaattttaaaaggttttaaaatcccttgtaaatctttcaaaacacttttaaaccctttaaaaagctttacaaatcctttgtaaatcatttaaagccctttaacatccattgtaaatattgtaaaacccttttaaaatcccttataaatattttaaaatccttttaaaacaaattttaaaccctttaaaaatctttaaaagatctttgtaaatctttaaaatctctttaaaatctcttgtaaatcttttaaaacccttttaaaatgccttgtaaaccttttaaaacccttttaaaatcacttgtaaatcacccttttaaaatcccttgtaaatcttataaaactcctttaaaatcccttgtaaatctttgaaaactcttttaaaataccttgtaaatctatttcccgccaaaaaaaaaaaattggtcggaaatttatttttgaaaacaaaatttggcgggaaattatttttcgaaaatttttggcgggaatttttttttcgaaatgttttggcgggaaattttgttttagaatattttaggcgaaaaatattaatatttcattttgttaacctaaaacaatttccaaataagggtaaaatggtcattaaaaatttaaagatggtagaaataaatatggataaaataaaagggtagagttgaaaaggggcatcatgaaaagggcattagaaagaatttttctttaaactacccttacaatgttgtagttcacaaaatgtttaccaattaatagtatatatatatatatatataaatatatatatatatatatttctttaaatacaaaatatgttatatactgatttaattaatttgaaaacgaaaatagcattactttatctgatataatattcttgaacatgtaagcatatattaaattaatatattgtaatatatttatataactttaataaatataaatattgctaggttcataaatccaaactacatttatgaaattaattctcaaaacacaatcttaattgagcctattattttaacaataatatattaattctcaaattatgaaggcaatccaaatttccatttaatcttttaaatcttcatcaactcttttacaaagatgtatatgtgtttgtgagaccagaagaatccgatgataagaagcacctaaaggagagctacttgtgactatgagggtcttaagtgtgctaaacaaagttgaagaacaagcgcaaagagagaatctgttccatacaaggtgtttgattaagggaaaagtgtgtagtttgattatagatggttgaagctgtaccaatgttgcaagtgagactatggtccagaaacttggtttagaggagtttccgcatcctagaccttataaactgcaatggctaaatgagagtggagaaatggctgttaccagacaagttcaagtgccgttagccattaggaagtatgaggatgagatcttatgtgatattctgcccttagaagccagtctgatcggaaagtgatacatgatgggtttaccaatagacatagctttgaatttagaggaagaaaaactgttttggcacctatggcacctcatgaagtctacttggatcagcttagcatgaaaaaggatctcaagctgttaaatccaaaacttccgagagtaaaccaaaggggagtactaaacctaatcttttgtttgtctttaaagaaaacttattgaatataacagccttggaaccggctttgccgagtagtattaagtttcttttgcaggactatcaagatgtttttcccgaggaaaatccagaaggtttaccacccattagaggcattgagcaccaaattgacttcgttccaggagcttctttgccaaacagaccagcttataggaccaatcccgtggagaccaaggaactagaaaagcaagtgaatgagctaatggagagaggccatattcgtgaaagtatgagtccatgtgctgttccagtgttgcttgtacctaagaaggatgggagttggcgtatgtgtgttgattgtagagcaatcaacaatatcacggtgaagtatcgacaccctatacctagattagatgacatgttagacgaattgcatggttctaccatcttttctaaagttgatctaaaaagtggatatcatcaaattaggatgaaagaaggtgatgaatggaaaactgcatttaaaactaaacaaggattatatgaatggttagtgatgccattcgggctgacaaatgcacctagtacattcatgagactaatgaatcatgttcttagagcttatataggacattttgttgttgtttactttgatgacatcttagtttatagcaagagtctaggagagcatgttgagcatctaaaaatggtcttagaagtgcttagaaaggaaaagctttatgccaatcttaagaaatgtacttttggaacggataaccttgtctttttaggttttgttgtgagtacagatggagttaaggttgatgaagagaaagtgatagcaattcgggaatggccaagtccaaaatctataggagaagtaaggagttttcatggacttgccggcttctataagaggttcgtgagagattttagcactctagcagccccactcaccgaagttatcaagaaaaacgtgggattcaagtgggaacaagctcaagaagatgcattccaagccttaaaagagaagcttactcatgcccctgttttatctattcctgattttcttaaaacttttgaaatcgaatgtgatacctccggggtaggaattggtgctgtcttaatgcaggataagaagccaatagcttatttcagtgaaaagctaggaggagctactctcaactatcctacatatgacaaagagctttatgctttggtgagagctttacaaacgtggcaacactatctttggcctaaggagttcgtcattcacaccgatcatgagtccctaaagcatctcaaaggacagcaaaagcttaacaaaagacatgctaggtgggtcgaattcattgagacgtttccctatgtcatcaaatacaagaaaggtaaggacaatgtagttgccgatgcattgtcaaggagggaagcacatggtggaggcttaatgggacactttggagtctcaaaaactcttaaggttatgcaagatcactttcattggccgcatatgaagagagatgtggagagaatgtgtgaaaggtgcacgacctgtaaacaagctaaggctaagtcacaaccccacggtttgtatactcctcttcctatttctttgcatccttggaatgatatttctatggactttgtagtaggtttgccaaggactaggacaagtaaagattccatttttgtggttgtggatagattttctaaaatggcacacttcattccatgtcataaaactgatgatgccatgcatatagccaatctgttctttagggaagttgttcgcttacatggaatgcctaaaaccatagtattagatagagacactaagttccttagttacttttggaaaatgctttggtctaagttaggaactaagttgttattctctactacttgtcacccgcaaactgatggacaaactgaggtagttaataggactttgtctacactcctgcgtgcattgataaaaaagaatttaaagacttgggaggattgtttacctcatgttgagtttgcatataatcattctgtgcattctgctactaaattctcgccttttcaaattgtttatgggttcaatcccataactcctttggatttgatgcctttacctttgagtgaaagagtgagcatggatggaaacaagaaagcagatttagtgcagcagattcatgagcaggcgcgaaagaacattgaagagaagaccaaacaatatgctaagcatgcaaataaaagcaggaaggagcttatcttcaacgaaggagacttggtttggattcacctccgaaaagaacgttttcctaacgagagaaagtctaaacttatgccgcggatggatggaccttttaaagttctcaagaggatcaacgacaatgcctactctttggatttgcaaggtaagtataatgtgagtaatagttttaatgttgctgttcttgttccttttattgtagatgaaacagatttgaggtcaaatccttttcaagtgggagaggatgatgtgataatgggaagcttggatcatggagctaaggagaagcttgaacccgaggagtttggagaaagaaagcagcttgaggatggagagcttggagctaaaaaggatgaagcattgcatgttcttgaaggtccaataacaagatcaaagacaaagctactaaatcaagctatcaccacacttctacaaaagattgagggcagccttaaacaagaagcttgtccaaccatgttggttgtgattcaagccgtttaagcaacaacaatggaggtgtgtgacttgcactctttttccctcctcttggttttgtcccattgggttttccacgagaggtttttaatgaggcaagcccacacactcttttcatggcccattgttgtttttgaagcccattagcaaaggagacatccaaatttcgtttttgtgtttttatttctctagaatgactctttctcttctctagggctcctctacttctctatatattctattctcttctcctttgtaagacttatcaaattttttattatcaaaacctctttctaattgtttgatctgaagggtgtgtaatatctcttcaacttgtgattgctttggtgtgtaatatcctagcaagattgagcccgaaagttcaagagtctttccgcaactcttggaagtttcacttcatccattttcagtttgttttcagttcatcatcatcccatcttcaacccttcaacttcccacagatccattcattcaccatatcaccatcacttcatcacaatctatacaaagagacttcaagggactggatcttgtcacccaagatcatatcagtttgtgatttaagttagaaaagaaattgtcgtatttaattattttataggtaaaactaatttcgatacgaaaaatcgccgcttggaatataagttttttttcttacattcaaaatacactaactgattttggattcagaataattatataataacttttgtaactaaaactataatgcatttattttattgtcatttttatcccgcaccattaattatctagtatatatatatatatatatttgtggaacaaaaaaaaaaagatcaaagttcaagaatttcatgattttaaatttcatagtaaacctatttgtaaatttaaaaggaaaattgtggaagcacaaaaaaaaactcaaaactaagcaatttcatgattttgattctgtaattagaatatttgaaaagatttgtaaatctacatatacatttttgcagccattttgtgaaataaatgctgaagttgggacttatttacaatgcatgccactggcatttattatttagttaaaaaaaattaaaaaatatattaaccaaactatatcttgcctaatttgtttctaaaaatctctacacaatattttcatatatcttttttaaaaaaatcgtgaattttacttcacaaaatatgcataaatccgatttatagcaaatatttatatcaacattttgcatagcaataaaaatactaatttataataattaaaatattcacataaaaaatcatatacacatacaagaaaaaaaactatatttatcatcatttaaaccgttcttttatttaaattaaaagcacaaaacttgaaatcatatactttatatgataaatttaaaatctatattagtaatataaattttaaatcattcaaggaacggtataccacgggtgagatcctaaattattggaattagaacaataataatttattttcttggattttataacactaataatttagctaacgagataatatagacggatttatataggatgacgggttttgatcaatattaataaagaatggtatatcacggatgaaatcataaaattaacaatcaaaatacaatcatacaaccttaaacacaaaaacatacaatattaacaaaacaaatataacttaaaatttaaaaaatttagctataaaaaattgacccgcggtatactgcagacaaaatattcaaaattttaaaatctaccatatattgttacttaaaaaaatatatgttttcatatctatacttcaaaatttgaaacctaaataatagtaatcatatactaaataatacagggatagatatctatattttaaaatacaaattaatatgatatatcttcaattaatcttttaaaaaataaatttacattttttaaaacataatagctccgcggtacaccgcgggtttaattctagtttatactaaaaacatatttgtggaagcattttgatttattttttacaacagatatggaaatttattctaaatttctatgaaactatattttctcgaatgaatgactacaaaagttatcaaaaattttggaatgttgttttgcagatttgaatgccgtcgtggtcttatatactagtagagatatatatacgtcttggagttaatagtgaaacaattcatcttagctgctagttagatcatatgggttgatccatatttgtattaaaattatatcaaatatatatggtgttgtaatataagaaaaataaattaaaatatgaatataatatcatattgatataggatttttgttatctaaattggcatattattttagatgctctccgcctctcccatttcttatcatgggtccattttgttagctaatgatacaaatgaaaggtaccaaaatatcatatctatcaattacaataatgaaattaggatttaacctgcaatatatcaagagacaaaatttgttgttgtaaaatatcaaatatatatggtgttgcaatataagaaaatttaaagtttataatattaggtaaaattaaaaagttcaactaacaccaaattataccgtacacaaaattttaaatttggatgtttgttaagttagacttcatgttcattcatatttggatttattttgatcttatttttgatattactccaaattattgtatgaatatttcagccgaggtgagacgttgtatacttttttattaattgagtaatatacgcccgtttcaaacgtttgaatcacaatatatgctgaaaacttatatttttattaactttatgtattatataatgattcaaaacaattaaaagacaaaatcaaacaaagaggatataggagaatcataatttaaaatcttaacaaaatattcaaatatttgtatttaattgtagtacaatatgttgatgtttacaattttatataaaattttaaaatcttttcattgtgtttggttattttaatccatattttatcgatttttagagtttctttaacaggagtctttaacctttttagtaagaataagatagtttttggtacttttatgttgtttaggtttttgcgcttgttgtagtaaaatgaagagttttggaatggaaatgagataagaatatgtgataaaaactatgatcaatcggtatgcttttgtaatcggttggtacagaagacaaagctaaccgatcaataggcattttgaatttttttcattttcttagattgtagggctttcttcctttgtatataaatactccttcattatcagcctcagagaaaagtttttgtgtgcgattttctctgtttgaaggttgttcttagttttaggatttgtaaagaaacttttcttaaacatttattattcttttataattctattattagttattattctatttctatcatgtcatttatgttcatgtgtgtagtttatgtcattgagttttggggtttttgaaggaaacatcatgtaaatttttatgggattgatttaaagtttttcgtctgaaattgtatttcaatttctttgattaaatcctgctagttggatcacaaccccaatcgatttctcgtggcacaaaaaatgttgttgaatcgatggacctattttaattgggcattacttccttagccacgaaagttgttaaaatccatgtttgaataacatatgatttataaattatacacaaatttcttaaaattttactttcaatacaccccctttaaagtttgcttaaatttataggggtaaaggacgtgagttcgagtactcctcttagcaattcttttgatttttttcttctttcttcttcatcccttgttaacggctgttagcttccggatttgatatcaccaatagtttatatacgaagtattttgaagctacaaataattagatgagatatttttatttcaacaaaaagtattaggtattaaacgctcattttattataccggttttagtacatcctgtactgttgcgatacatggttagtgatcagaatagtaaacttgaattggtcggattagtaactgcttagtgcttaccattgttaccagtttttttttgtgccgatttgataaaacattaagctaaagcagtacaaatccttagcgctttctcttatccataaaaacaatacctctaaaagattcatgtcctaggattcctataaaacaagaactaaccaacatataaagtaactatggcattgattttcacaatttttgaacaactgaagatcatgagagtaacaaagctctaaagtacaaacaaaaaacccagagatggagcaaagtgaatgcaatacagatgaagaagccgtaaagcgatgagctaaacgacgacgattattaatcaatatagttgtaaaatcagctaaaaatgaagagaagttagaaaacaactccaagctaagtatgatactactggcttctcccttgttttttcacttgccttctcaacaaagctccaaagattcttctcagggactttctgtttctcttttgcatgattaactaatatgatgaaataacaacatatccataaccttcaacttctaagtttttttgtttccttttttaaaaaataaaatccattctagagattatgattttcttttgttgacttgctacctctttgaactcagaagggagcctccagtgacgagtcatcccaaacctcagcacttccattggatgcatcttcaacatcttcttccattgatagccgaatatactctctatgtgcaaaacggtcccagtctgtcaatgtcgggttctcgcgctcctgttttcgtttgacatttgaaatgttataagaggcccattgtgtcaagaaaacagcaaggttgaatatcaaacgtggagtagtacctgacgaatgaggaacggatcccgggtttcaaatgccataaatttgtttagattaaaaaggatgttgaagacgtttccagagagctttgagcctttcaggtcatgcagcgttatatggctttcgttctgtggaaggaaataaaaaacaatcaaacacaagacaaaatcgcaagagtcagaaagaaaaactgggaacccaaactacttctgtgactgtcatatatcttccttaatatagaaagaaaaaaacaagagacatattgttgaacctcaggtccgatcatatcaatcatctgacataagatatcctcgaaaagaacagcctcttgcgccatgcactccattctatgcaactgctcttcataaaagaattgcatctcatttcgcgttataatcccatttgcatccaagtctatgcacttaaacctagtccaacgtatacttgtgtcagataaaaagacttaaaatcgtatctgtctgcaactttcggacccttatatcacaacttaccaatattctaggctaggcactgacgatttatcttcttccgcaagaatgaaatagacaaagtcttcataccccatcttcccttcaactttgctagtgaacttcctagcaacctaagtagaaaccaatgcattatccatgatgacagtcctcttaagagtaataataactttgaacgaggacagaactcttaaatggaagcaatataaacaaaatcctcaagtagaaagattttttagacagaacctgggagaatattctgtcgacaatccggtaggtaagagcatggtttccatatctcataagattttctttgtcaatcaggaaatcgtgatccgtatccagctcccagaacttgcagtatatgacatagaaatgctcatatgagaagtatctatttgccaaagtaagtagaaaagtcatgttaaatgagcagaaacaataccatatatacaacaatagcacaaatttgtttttgtcagtacctcaacactttgttaatatcttcttcttcatcagcatgtagcatagcatcaattaagtttccccgtttaagctccctaaatgtaattcgaccattgccagatctatttatgtagtaaaatattctgtaggtgacagtttcagctgtttcatcaaaatgcaaattgtatcagcatgtagcatagcatcagctgtttcatcaaaatacatgattcataaacaagctccagattttttttttttctctaatattgattcatctgcaggattcatagacagaagatgattcatgccgtgcttgaaagctttatggatttgcaagttataagatgatgtctaacacaacacaacacaacaaagaaaccgtatcttataaaatgtttcaaatccatacagagtaataccacatttattagtgtatcttgatgcatcaattatcaaaattatcttatttcactagaaatactattgatgtggtaaccattcgacagatttagataagtacatcataccgaaaatggcaaacttattcactcattcttctcaactagggctgtagctaaccatatacttcgaagaataaaatgtacaaccaaactcaattactaaacaccattactcaagcaataccaagcagaaaaagaatacattagataaattaggaaatgtaaatgaagttgagacctaaccatatctttcttggaattcaggtgtggattgcaggaactctaggccaggatgcgtcgccaacagttctttaagtagtggtttgaaatcatcctgccatgaaaaaaagaaaagaaaagaatagaatctggagtataaactcgctttcatgactgactgaatatgcaaatcaaaagaaaattaccttaacaatgaaactctgatctttctgctttaggatcttgaagatttgggtcgttgtatccattatcaacatgttcccgtttacccaaaaatcaataaatgcatctctgtagaaacaaacacgacaaaactgttatactgggtggtgtttcagtaaactatgcagacatgaagaggaagcaccatacaaaaaaaaaagcatagaagcagcagcacacacctagtaacaaaacctgtattgttgagatcgatcttccggaaaagggaagtggagaagaaagatgggagcttgcagatttctctggtgactaacttgaattctgagtattgattgaaaatggagaaaaaagttaataaacagttaaaatataaatagtagaaaacaaatgactgacttctaaccttgtatctgcaagccatccatgtgaccataaaagaagtgattgattctaaacatacattgctctttaatctcgcttggtggagggcgaccattttggaaataaaactagaatcatttcaagttaagaaatcagtgagttaactccattccattactctatatatataaagaaggaagtaaaagaggaaaagaaacctgaggtataggctctttaacaggctcgttgactactttgagagtagaacctaagttagaaggggctctctgtttggttgtacggggtgaaccacaacttcttggtgaaagaggaggagcgcttcccgcaggaaacatagatggtatagtggcagaattagaacccgatgcacttccagtaacattgataggagctccagctacagcatccttaagcaatgatccaacctagaaaaccgattaggaaacgagaaaaagattagactagagattccagtgaatagagtaattaacctcagtaacctcctaaggcatcattgtcataactcacacaacccaagaaagattcaacaccacagagtaaatctcagtaacctaagcatcattgtaacacccactaacactatcaaagaaagattcaaactttacaccaatgctcaacagaagccagagagtaattaagattatgaaagaaagattcgaactttacacgaatctacaactcacacagagtaagctaagcatcattgtaataactaacactatcaaagatctgaactttacaccaatcctcaacagaaacaaatctcagtaacctaagcgtcttaactcacactatccaaaaaagattcaaacttcatcacagtaacgtaagcatcaatgtaacactcaccaacagtatcaaagaaagatacgaactttacaccaatctaactaacactatcaaagaaagattcgaactttacaccattctcagtaaccacctaaggcatcattgtaatactcactaacactatcaaagaaacaaaaaaaaagattcaaactttacaccagagagtaattaagcaaccaaatctcagtaacaacctaaggcatcattgtaatactcactaacactatcaaagaaagattcaaactttacaccaatcctcaacacaacagagtaattaagcaacctaaggcatcattgtaacactatcagagaaagattcgaactttacaggaatctacaagtaacagagagtaagctaagaagcatgagtgtaagaattgtgaaggcaattcaaaaggcagaaacctgtcgctgagcttcgggaagagaaagccactggtcgaagagcttctgagtgaatccaggtttagaattgagaacaaaggaagacatttcctgaagctgcaacaaatctgcatccaaacaagccatatctccgggaataaccgtatccaccatatttaatcaatcgcatcaaagtcgagaagatgagagaatgatctttgaggcgaacgaaattggaattttgaacaaagtcgagatcttcttcaccaacacatcgaatctagtcttccttcttctccgattccgaacaaggaaatgagacagccaaattcttttatttatttattcttttgagcaatctgaaataaataaataaattagagagatacccaaaaaatacttgaaacagaaaaagttgattttaagggtttataatttattaaatgtttgggtttgagttaagttttttggggtttagggtttattttttagagtttaggatctagttttgaaaactttaaaagtaattttgtggtattttcagaaaataatatattttagtggtactttcaaaaaaatataaactactaataatgttttataataaaaattaattttatggtattttaaaaaatatgtccataaataaattaatatttcgttgactaaataataaaaataagtaagtgtatttgaagtagaagttttttttctcaacatgtggttgaattcttgattttttctatattttgtcaaccacacattagttaaaatattacttcataattggtagtccaatcttaaggaaaaatatttacgaaacaaatttcatataatatactatctagagtaacgagttagacaatctaccttatacaagagccatgaattctagaaagaaaaaaagttttatatatcatataaaaaatacttgacgaatgagaaacatatgatgtgtttcatatcatgttttccatatttcataaggttttctttgtcaatcgggaaatcgtgatctttatctttatcacataaattataatatatgacatagaaatgctcttatgaaaagtattttgttgccaaataaatagaaatgtgttgatatcaaaaaaactgacacaaaactatagtttgcaaatacgtgtaacttaaagtctgactcaatatttataacaacaagaaaaaaaaactatttttgttagtatctcaacactttgttgatatcttcttcttgatcaccataaagcatatcatcaattaagtttccacgtttaagctttctaattgtatgtagatcatatctagatcgatttatgtcataagatattttataggtaactatttcaactagcccatggaaataaaaattgcattcttgaaaacctgagacatggtaaaatctaatcaggttcacataatttttcttgactaaatcacatatcatatataattcatgtacttttaccaaatttagcaaaattatccccttattaacaacattaactagggaaaagaaaaactatagtagtcatttagctatggaagacaacaaaaatgatcattctctatatgggagactgccatgtcatgcttgccagccctagagaatcgaaaggtaatagaagatgtttaacacaacaagaaaatcttattttagaaagttcatatacaaacttgcaagtcatacactgtaataccacattatcccgatgtaccaacgatgaaattaatcttaggcatctagtaatgatattaatgagagaaattgttaagtgatatttttaacattttttttaggtttattatgttttatcaactctttattcggaaacaagtcgttttggatgttttatcaactataagccaaaccctgtatttcgcgatctaccgaacagatgctctatggggagtaagctgagcccaacatctcgctccccaaataatatggtgaatctgcctcacttattttttacatagcccgcaactccctcttcaaattatacataggtctactaggcataagccgagagacgtctcgcgcctagtacacaccgaatacttttatcataaaagccaagcttagtctcgcacttaacatctaactcggactttgacagaaaaaattgagtatgacttctggtgaaaaccaatctactcaaaagccgatctcgaggattcgcaggaaacttataagtcatctaacaaacttaaatgtgaaagtcataaaattgatattaataaatcaaacaaagtttgctgccattacaaaggcatttattcggaaaaagtaaaaaacgatcaaacaattgatctaatcttattaaatttcaaaaagcagaaaacatcagatcgcccgattcgaaacagaatggttatccctcagaaggcgatctggcataggccataccaactgcaagtcgactttctcccaatcctctgacagaatctccaacgctttgaccatctgtttgaattcatccagacgagcagtaactttcttctgcttagctcttattttggcgacttcggcttcaagttcctccggacgggaatccaccttgcgcttcttatttcggaaatactgaagttcacgaaattgatcctggtgcataaatccgacctggatcgagaatgaaaggcggagataataaacatcaagataaagcaagaagaataaaatagatggttcatacctggttgacaagttttgagattcggtaacttcagcatcagaagttgacggcctgagataaaacagtgagggcgttctgggaataaaatctcaatctgcaataatactaggattcctctctttcaaggtgacagtagcatcttgaacacatcagttggcaggttaatgtctggcatgggagccaacctttgaaaaccattcttaatccagttttgtggatgagattctaacatatccaatttatgaagtaattcggctttatgatcttcatagtagctgagtaattcacgatactctttgtgccttcgttcaacacatgataggaatcctaccgcctcatgcctctcctctgaaccttctcaaaactgaagagtcgacgagactcagatattgttgaaaagggcatttcccgttcgattgcttcagcattagaaaaggtcgggacatttttgctaacaaagaaagaagatctggaactctccattatgcggtaaaaggaagaagatttagattcgatggaagaaacgatggcgcttggagaagtatttataaaatcaaaatagaagtgggaaggaactttccctattctaaaaaggaattttcacctttttccttttctagagaaagtggaaattgagataatttccttttagttttgaatgaagcaaaagtaagtcgataataatctaaaaactagagaataaatttaaaaccgccccgcgtgtttcgatatccttgacaaataccatatgaagctgaatcctaccaagtatacgttcagagtaacatctagcttattcttgggatacatagtcactagcaaggaatcgaagcaaacccaaatcagataagtgcaataatcaaactaccgacattctagaataaaagagaagtccataggctgacgggtcgcattgcatctctgaatcgctttatcgcccgatcaacggacaaatgccttctgttctacaagcttttatgcggcaataaggacttctattgggatgggaagtgtgagaccccttccaagaacctaaagcctatctcatgagaggggcgatcttggccacacccgaggtcgaagagacattgtatctctatgtcccggtgtcaagttcggccatgagtggggtattagtaaggaacgatcaaggtaatgaaaaaccaatcttctacaccagcaaagccctgaatgacgccgagacaagatatccaacgctggagaagctagcattggcagttatgacggcagcacgaaagctccggccttacttccagtcgcattccatagtggtttttaccgatcaaccactttggacaatgctgcacagcccaaaccagttcaggcgaattgcgaagtgggcaatcgaactgagcgagtacaatgtggagtatcgctccaggtcgagtctcaaatcacatgtcttagcggatttcatgattgaattgtccccagatgtaatcgatgaggtccttgaagaaaactggatactctatgcaaatggcttctcgtcgctgcagggttctggtctcggaattctactccagtccccaactagagaagtgctcgagcaatcgctctgacttcagttcaaagcatccaacaatgagggagagtacgaggctctcttagcagtacttcgccttgccaagggaatcagagccaaccggataaaagctttcggcgactcgcaacacatagtaagccaatttagcggggaatttgaagcttaaagtggatgaatgtgagcttacctttcgttggtcgaagacatgtccaagaaattcgacaagttcgaatagataaaaataccctggagtgacaactcgtcagcggatgctttagccgcttttgcttcaaacacaaatcttgatctaagacgcacgatccttgtcgagagcataagcaaaccgagcatcaacctcccagttcgacctgcatcattgtcaaacccgtaacaactatggacgtagatgccgagacatccgacaagccggatattaaagtagacccgcagcctactaattggagagatcccatcaaactctacattgctgatggcgaaattccggcagatcggtgggaagctcgtcgcctaaaggcaaaggcgcgaccaaggcgttcctcacatgcgtaaacaaagaggaagccgccataatcatgaaggaaacgcacgacggggacggagggaatcattctggtggacgagctctagcgctcaaaatcaagaaggatggtcactactataacgtccccgaatcgtcctatggtcagacaagccataggcgacccagttacgctataatgaagatgatcgaccacaacttattagagattccaaatgaattcggttccttaaccaaattataatggaccctcttctcactaggaacatcacttaggcttgctgaccctcgtgatattctagtgttgagcgacctagactaggtcttatatcatttaacactcggctgcttttaagaaaacactttatacatagtatatagcttatactttgcaaagagttagcaaaaaatatatctgtatgtcggatccttgttaaaatttacataataacaagtaatttttgcagaggcaacacaaatatcctatttctgacaattcctagtgttcgtctccctgctaaggtcatccctctatggttacctgtaagacaagtagaatcatgagtaatctaacattactcagtgagctgggtctatgcacaaataaatctctaaggttgaatcaactcattaagtaaacctaaccatcagagatcacggaacatgcagcaaacgtattatcatatacttataataataccagaagatgcagccgaactagacacatgaatgaaccttgggcccaacatactgccatccttaccaaaaacgtgcaccacaacatcagcacaaactcccgcatacatgtatacatgttctccacacgtatgctaccacacacacgtacgtgcacacccacaccacacgtacgtacacaactgtgaacacccgagctatagccacaaaggcttataaacggaacatcactctaatgcatcgtcatgcattacccggcatacgctccttgtcttgtgccatcatgtaagtgaccactcaaggtcaagacttactaacacaatcacaacacaaaaagggaggcaacaacttactctaagcatgatggtatcgggtaaaccctgaataccacttagacacaataacctcatccaatacctaatataagtagtttaccatacccaaacaagtatagcacaatcaagtaccaattcacgtatttatatatatgcataatatatcaaggactcattcacaacttcatagtatatttcatataagtataacaatctaacaaggcaagtaagccctcgaatcaaatcattaatcatcaagtaaacttaattacgtccttattcacttagcctagccatgcaccaattcattttatcccttaacgttattaactatcaagttcgtcaaaatgcccatatcattttaaggttcaagttcaatttagccgaattccaattagttaagtctaagtgagtaagcatgcatatgatctaaaaactagctatagaaaacatgcaaacaaacacacaattcgtcacaaactcacggattcggtaaggtttcttagtcgcaggcaagacttctcgatcatggtcgacaattctttacccacggacgagttccctcgaccacatgcaatgattccccagtagttgacaaagttctctcgaccacgggcaattttctatcgattcggggaagttttctcggtttcggacaacttataagtcaaataaaaatgaaaataggcgaagtttggcatctatttatagtccgcctcaactacccatgcggcaccgcaagccgccacacatcaggacagctatcgcacccgtgggcgtcaagtgccatagtcgacggcgtggtgacaagtggcgacgggtgtcactccaccgccccatcagtttcggccccaagactcagccgacttcagctcaaagattagtgacttgagccgcaaggcaccgcaagtgaggtgtccacacatgtcggttccgcgggcgccattttgggcggccaacttggttctgcgggacggcaaagttttgtccaatctttcccatctttgcccattcgtgcccattcttgcccgtttttgtcatttgatagtttggtacctttgggcacattcagtctatcggccgtgtattcggtcaactttttctcattcgatccttggcccatgcccgatgcctttatgcgggtcactacaactactggccaactatgctgccggactgcgaggcttattcggcgaagtgcaaaccatgtcagcgacatggcccgatgaaaaatgtgccacctgaaatgttaccctcagtaacagctccatacccgttcatgtgaagggccatggatatcgtaagactatttcctccttcgtgatccaaaaggtttatgctggtgctaactgactatttcactaaatgggttgaagcggaagcatattatgaagtccagtcgcctgcggtcatcgcatttatctggaaaacattatttgtcgacacggtcttccgtatgagatcgtaacagacaacgggaaacagtttgtctcgctcatcacaaaacaaattcctcaccaagtggaacatacgtcttagtaactcgacgccgaggtaccctcaaggaaatttacaagccgaggcaacgaataaaaccatcatagctggaatcagaaaacgacttggcccgaagaaaggaaatagggcgaatgaactggagggggtgctctggtcatactgaactactcctcgaagacctacggggctatctccattctccttggcttatggagtcgaagcaatgactccaagtgaggcaggaactccaaccttgcgcatatgtatgatgacggacgattccagactcaataactggctattacacgatcacaacgacttttcgaggaacctcgagatcaagctctagtttggatccagaactatcagaacgcagcggtgaagtactacaactagaatgtccaagaacaccgtttcaatataggtgacctcatcctccgagaaattgatatatccctatttttactgattttatctatgttttaggtttaggattttaagtctttatgttatttctcgagtctttttagtgtattttcatgtattctatgcagtgggacagcgatagagatgaggagacattttggagcaaaagctaaggaaaaggaagctaaggacgattttggattcctgattcagagagagtgtcgatcgatgcccagcaaagtccatgacgctttcaagtttacagaagtagaaatttgcccaagaagacttctttatttgcattattagtctttggacgttttatagggtttatatatttttttagaggtcattgtttagacctatcacttttctatcaagatggcctcgcgaagccaagctggtcaagagacatgttaagatcagtcgctccaaattcgatgacctccagggcatcaaccttatcgttccctttctaggttaaattcttgaggtcatcagttcaaactctgaaatcacttcgcctcttttcatccggattctgactatctcttctgcaccatgggcctgattcagagcgtccacctttggcttaacaacctcttcttgctcggtgaggtagccttcattttgtcgagtcgagcttgagccttccaagtaatacgcgcgaccttggcagctcagtcaccctgaagtctgttgcattccttttccatgtactccttggcagcaacaagtgcgatctgcagcttctcgacctcctatgagagctcggcctcacaattgttgagccaggcgatctaatcattcaatgaatcgaccttcgccttatttgtctcagcagccaccttcagagtggccatctccttcatgtctacgtcatacctgatcctcgtctggtcgacgcttttctttaaattgaagaaggcgtctatgtccgcaagctttagttttagcttacaatcgtaggtggcgatcaggttgttggcaagcgtggtcaaaatgtataacagatggtcatgttagaaataaacctctaaggatgatctggcaaactgatggtactcttctcttagtaccaagtcgtcaggattgggaagcgcattcgccccagggagcatcaagttgcgccataggtgactggccgcttcctggtccctcatgaggaaccgatctccaacatacttgaatgaaaattgatcagggttgatagattcacccctagataagcagaaggtcttgggtggcggagcttcgtcggtcaaaacggcatcagaggttgatctcttcttggcctgattagccattccttttcctttctcttcacgggacttccttgtattctcgtgtttcgcaggagtttcatctctggttggataagagatggtctggaaaacgtcgacctgtgtattctcaggcgcggtgacttgagcaacagcaggtcagtcacccgcattaacctgtacagcttgaggtgcgactacctgaacaacagcaacttgagcctgatcattgtcaacgatcactagaacttgagcatcttctgccccttcaataagtagcaggttctgggtatcttgagcgacctggttctcgtcgagaacctgattgatatcagaagaaccgggggttgtggtagttagcgccagggctgatgcgttaaaaggaagaggattctcttctcagacaggagcttgaggaggcggtagattcataagcctggaggcgaagttgacaaaagatttcctgacttttcccataatgcgggcgactcgtagtctgttgacgcttttccacatacgatttcgagctcggaatattgccgctctaacttcctcgaacttcgctgggaatttttggctggctttgtagcgatctgaaataaaaagaaaagaccataagagtagatacagatcgccgcgggagtaagctgggagatcgccaaacgacggcaagagaggaaagaaataattaaagacggaatcgggcaccatagatggcactgcttgaaatacgcctcatggaaccagacatagccctttgggggattccgtgggtggtcatctgttctgggaatcatgtcagtaatcccataattcacaaaaccacaggaggtcagcatgtcgcgatagagcgctccgtggaaagggtcggatttgcggcgatcttgtcgttctagccgacgatcgggtcaagattgaagtcaacaatctcaatcgagagtagcttcgcctcaacctcggcttcagtatacttaggatgaccgtcgtactcgtcttctatatcgatgatgcattcaaatcgatctaagccatccaccagttcatcatggggaataatcagatttccaccatcttcttctcgatctggctcatcccttaacgtcgggatgtcaatctgattggctcgactagattgggcctcatctcctcggctttgaacaaaccgagaattacgacgaactaacataatagtctcactgtcataagaggagcaggagacaataactgccttacccatggtcctgaagttgtcaaaaatcaacgaaagcacaaagaacagaaaatagttcgtaggagaaggagcgagaactaccttcgatacttcttttgcaagcggcggaaagtgaagaaagaatgggttgatcgaatttatatagaaggcaatgtgcggcagacctacaaaaataatcattagacctacaagacggttcggttgccaaactccacgcgtgcgtgcggatgccaggctatgacacgtgttggagacgtccgagaatatgaaacgattcagaaatctaatgattaattcacacattcctaagttataaacaaaagattgacttcctaaattcggaagttccggattaaagtattcggatctcccgaactgggggaggcctaattgttggtgcaagaattaacacctccgaaaataccagcttaaaccggaggtattgtgaataaaatcgagaattcgactaaaccggtgtaccccagttaacctaccaaagcaatgaggtcgccagccgatctaattcagcagttggagatcgcccagccgacttcctgaattgaagaaaaagaagacttccatgtaaactaagagaatgtcatgaagaatggaaggaatgaagattcaagctttaaataattagaagtttagcatatctttaaaccatctaagtgtataaatagagggatttgtcctctattcaattcatcttgaacttaatactaaaaccctacttttctgagagaactcttgagcaaaaatcctagcttccttctcaagctaccatgttcttctttcgtatcgagcctttgattacttttgagcctaagagagaagtaaatttatctaaacccttagtataaattcattgtttgatttactgagtcaataatcatttaggtgagttccttggattcactctcttctgtataaatggacacatttttggaaatgtaagaatatttaaaataaatgttttgaaacaatataaactcaatgcatacatttaagataatttaactaaaaataatcaaagatcataatatttgaagtcaaagattaaaagaattgttttcatttgcgtgttcatcagcttttctagtgtagacatttagttgctaaagaaaaaaaaagtgatttaaaattttcaaattatttatgtattttatgttaggaacataccatatacattcctatgtttccaagttatttacttattaaggttccaaataaacaacacaaaggttcattctgtttttaaaatgagatttatagaaatcgtcttttcccaaatgttcagacgaagattccatcaaatctacatttgagctatacccaaatttctgtaaattattttagtatatttgtcaaactgtgttaaattttaatatttttaattcagtctacatattataatatttttgtttgaaaaatatacatattaataatacaaatgtattatagaaatatgattttgatgaaatatgggtagtacttatattttattaactaagaaatgttctcaatttttagatcattaaacggaatataatatatttacgtttaaaaaaatagatagaaaataaatactgaagatgaagaatccactatttttgaagagacggtcttacatttttagtcggagaaaatggcacagacccctcctctcttcatgtggaaatggaagtagggctagccctaagcacatcaaagtgaaatatttgctgtggtccaaaatttaagtggcccattaaggaacaaatttttttatatgtataattcatataaagagtttcataacaaagaaacacaaacccaaagtctaatagatttttgtatgggctgatttttatatgggctgcttaattaataaacaaacctattttttaattggttttgtacttcttgtatggtatgacaatggaaaattttggcccccatttttgttttgctctaacacaattattctcagggtcggccctgcatggaagctccttctgggttatgaaaatgatccttccaacatgtattaattgtcatatgtttgatacatataatatagaactattttcgatagtgaaaacaccggaggaatggcccgctttttctcatttttaagatgagattgatatgctaagtgatttgtttcctttttactagctttctagaatgcatgcctcttgtaatgataaggcatattgcctaacttgttactctaaattttaattatattttctgaaatttcttttgttaatatgtttcctttatattgggttactaacacatgattgttggtgcggaatttagcacctccgacaataccggcctaaaccaaggaaattacaagttaaattgagaattcagttaaactggatacccaagtttagcatgttaattggttaaatttaaagaggtcgttcgcctatctcgacctgaagtagggaaatcgccagccgacttcgtagttcgaaaagaagttattctccctaccaaaaaaaagaaaaaaaagaagctttcctttttggataaaggagaatcgccaaaaaatagaaaaatagaagattcaagctccgaataatagaaagtttagtttatctctaaaccgtcttaatattgtataaatagaggaatttgtcctctattttagacatgtgtaacttattactaaaaacactactttctctattgttcttgagcaaaatccttacttagcctcaaagcaatctcaaattcatttgtaatcaagtccttgatcaagctaatacaagagagttaattgaaattttttttcccctttaaacaaattcagtatgtgatttttttgaatcaacaatgaccaaggacatgttttctgaagcttccctgaaaacagactcaaaacacttagacaacttcaacttactagtctcatcatctccttctccatcacgatgaaggacatgttcttgaccctgattggtctcattccaagccaggtactccttgcagatttgttgatgattctttagaaatgttgtaccatttgatttagcacatgccatagttctagcacaatagtgacatctatatatgttcctattatccggctctcttgtgtaatgttcccagacccaagacctagttcttggattcttcttctttgacctagaacctcgaaagaactgtctgcacttctaggaatccctttcgttttgcttacattttcaggagaatcacactcttcagtttctattccctcatcataggcatcatcatttccatatccttcattcgggtttgaagagtccatctataaaataaaaaaccctgacagattatcagattttaaactcataagcatcctcagtttcagacatgatatgaaaatctcgaaaaaaaaaaaaaaaaataggaaaacaatctcagattctcagttataaaccctatttcaaaaattcacatacatactcatttatacactctaaaccgaagcaaaatcgaacttaactcaatcaaacaatctaagttataaaccctaattcgaaattcacatacaatcccatttatagactgtaaatggaagtaaattcacactaaataacagagatttgaaaccaaaggcaaacaaaacataaggtgaaaaaaatcaaactaatatagaagagtaaccctagaaattacctgctaatgatttctccgtgaagttgcaagaggaaacaaagttgcaagtcgtcggagactagaaacgaagagtgaaatgcgagtggaggcgacgagagaaatgcgagagagagaaagtgaggtgagtgaaacattaggtatatatacctaaccagattagggttagaaacttagggttaagaaattaatttcaggtttattcggttatccgaattaatatcggctcgatatgaaccgaaccaaaaccgaaattaaaatcatatacaaaccaatggaattttaagacataaccgaatctgatctcaatcacaattttaaactcaggcctagtatatgtgataattgtagaagaaaaatcacaatttttaatggaattctaccaaaggaatctaatttctaagcatctaatatagtaaagtaaggtttcccttcaaaaccaagctcttagaggatgaccatggcatccctccttttgatatgtgtcattctctcaaatccaaatacatcatgtttctacatttgtttttttttatcagaaagtcaacaaatcaatgtcaaattactttatgccgaaacaaaaatatcattatatttattttataattttaagctaaaagatcaatttattttaagatgtaaagcaagaagatatccttttatcttataaatcacaagtcagacttgccacataggtttctattttttatttttaacgcgattaaacaaatagttgaaatcgtgcaataaacaaacacaactcatggctatctaagcatttttcaataacggattatggtcaaaaatttatattgcaagcccaacccagtttttaagcacaataccccatcttaattcatagtattttgcaaggttttttttctctttcttcctcatctatcgacaactttattcaagaaaatctccgtcaactatcaaaaaaatctaatccctaattttgctcccactaacacttccacgttcaagctaatttataactgattcatcttctatttaactccaattgtagctacatcttatgttgatttttcatattcttttaccctttttgataattcagaattgaagatgcttctggattttactcatgtttcacatctaaattcttcaaaaaaaattatgaaagatcagagcttgaatatcccggacttgggatttttatcccaaagacaaacctgaagtaattctcggcatggaagttattcttgtggatgaaaggtataaaaattttcgatttccagtttttataataaatcagaggttttaatttgacgttttggttatgtattgtgaatttttctcctttattcgaaaattgtgggtgctattgactataatgggtgtaactgttgggaatttgttttcatggatctctacgtatcaatgtattgaactgatcgctttgatttcttttgttatctgctatactgtttcgtgattaattgggcattttctgtgataaggtgttatgtcttattatattctagaattgcaaaacaagagtcatgtcacctttactaaattagcaaacaataaacattgtgtaatctcttttgtgaacagagagatcaaattcaagcatctgtgaaacaaaaactagctcaaaaatttggaaacgaattgtttgaaggagaatattgtgatatcatgacttttgaagtgtctaataacaatggtgactacaagggaaccacacatccttacaaaattaacttcatgtatacaatgtgtatgaagccttctgagcatatctctgatatatctcgcttcaatttctctcatttttcagagattttaactcaatctaatgtcgatgaaactttcattggttggttttatttcaacaatattctccatgtcaatatgtctcgcttcaatttttctcctttttcaaagattttaactcaatctgatgtcggtgaagctttcattggtaagttttatttaagcaattttctatgtcaatttactttcataattgaatcagagatgtatatcaattatattttttgctttttcagatgttagtggagaaattattggtatgagtgagattattgtgaaagattgttcggataatatgtcaaagttgttggatattcaacttagagatctcaggttattcatagcctaactataatgataacatggttatctcaatttaatcattctttaattatttgatttttgttgcagtcaaactatccccgaatgtactttacggtaaactcatgttgaagatgttcattcttatgtcacgaacaatagtgaagggcctctaattttacttgagagtcttatgaggaccaaaaaaattaaagttaaataaatctacttttaagattgaaatgccatgtcaattttaaatattgaaatgccatgtcagtttattttataggtaaaatatatgttcagaattccagtatctataaagttgtttcttaacaaagatctttcggatttaaaacacaggaagaatatttttgttttcataactataattttcatgaatagctattacttatttttaaaatgttgaaggatgcctgatagtgaatcaaatgatgctcttagagtttctcaactcatgactccggagttgagccaaaaagagaaagattattttccgttaggtagatggaaatctattgatcatattactacaaattttgaggtattagtatttttattaaactcaattttatataaagtagtaatatacttatatgatctctattctacaacattaggaaagtagttgtgttacttatgcaagaattttggaatttcaaaaggaaattccatggtacaatgtttccattcagccataccctattttaatccaataactgatgaatatgagtacaacaagtattcatgtgaaccttgcaacaaggtagaaacatccacgagtataaagtaacatttgccttaataatttaataaagcatgagactatcatatcacaaggacttaagaaatatgttttttttttaacttgatcttcaggtacaaagtacatgttaaagtggttgatcatactgctacaaccaatttgttccttttgtttgatagggaagttattgaactgattcataaatctgcctatgaattacttgaacaacaagtacatgtgtgttttgcattgtttatatatcattttcttgattgtctgtataatggagatttctatcatggtataaccaaaatttcttgtgtatttttaaaaatagtttaaccgtgaagttgaaattcttcaagatctcattagttttagaggaagaaacattgtttggattgtaaatgtgaagggtactaaaagaaacaatcggcattcaagtttcaaagttgtaaaactcattaaataactagaaaccttctagcaatatgaagataatgtgatctttcaggtatgttatagtagttcagccttagtagaagtagatagcggcacagttcgatgaaagcatgcgaattaactttaattgcaattttaaggagggtactcattttgaaattcctacacttttaatcacactaaacgctattcaggttatatagttctacatatttctcatgatatattattatatttttcattagatgacaagttatcgcatatttgcagatggaaaatacgtcttcggaaacaaacaacgatgagttgcctcaatgttcttctgatacaccaagcagaaaacgagaacgtaatgatgtaatcgatgaatgagttcaagaatcttaaacaaagcaaaaagtatcgtcaaagatggttccaaagagctgaaaaagtgatactttatgtaacttacttttttattttcatgaatctaagcatctatatgtacctttattattagccaatttctactttaaggtatgtaaatatttcgtatgacgagtaggttttttcttattgttgatggtaaattatgtattttcatctctattcacaagtactttagttttttttttagaactcagaatttataacactccttgaacatatttacaataaaaaactaaatcttaaattttaatttaaacgaataactctcaaaatataatataaactaatcgtcatgataacctcacaatttttcaacgattattactgttcagtcgagtttcagcaaactactttgacatgatatcatatttaagttacatcaaaatctaataacaaaatatgtgtttttaatcaacacagtttcaatattttagagattttactagagaacttaaataaaacatatatcagtaataaaatccaatggttttacattttctacacattatttcagctagaagaattaggaacaaaaactactgaaatttgctcagaatgactctacttttaatcaaaataagaatgactcccctaaactagaatgactcaaatctttagtgaaaagactaattgaccagaatcaaaattaaacccacaattctcttgaaaaaaaccaatttagaaaaataagaatagttaattaagtaaaaattaaaacaaaaatgataaatattaaaaagaaacaaaaacgataaatgataataagaatagttaattaggtttttgccgtcaatatttttctttcaatcttcttcttccacttcttcttcttcgtcgatatacccaaaaccacgatctcgaaatcaacttctctgacaacaacaacggtggcaatatcatcaggatttggcgatttctctttgcccttggtgagtgatttgtttcttctcatatttttccctttgcatgtctcttattcttcttctattttctatcggtttgaatgaattgaatgtttggcacttggaaagtcattcgatggattgtgtgatagaaacatacaagccctggggatcaaacttggtgcggagatgtttgatgaactaggagagtttgttgggacgcttaactgtgagactcgtcagaaataattcgagattcctttgtggtttgagcgtttactttctccttcacctcaacacaaagccgagcagtttctttcttcatatgccccaaaaaagcttgaaattgtctattattaccaataataactggtggtgtatctgttggtagttttttttatttgagatcttgtaactcaaaagtacttcgaatagcctgttatccaaaccgtaatcctcatacaccattggaacaaaatcatgaaaattggtttcactgttaccttcaagaactcgacaacctttaccattatcaacaacataaagccatttggttttctcaaaaatccatcttccacactcgagaataatctgatccatacccaaccccttattcttagtatgaagaaaacgaattagaaagcgaattagaaaacatgaataaaaagtcacagtaaaaaacgtagatgaactaagaaagagaacaatccactgaatttaagaaatcccgaaaaggaaggaagcgtaatcgtagtgtataattgaaacagttggagcgtaaaataaggagaaaaaaacggaagtgaataatctcaatttaatgcaccaaatgtcaatatgaaaataaatttaacaaatctgttgtcatcaattataagtctgtcgtaacacattgtaaataaaccggttcacccaagctctcaaaccgggtaacgtttttgattgagcgtttaacaaaattttgaaaacaagaatgatgtttcaaaatttgaaaacaaatttgtcaacaaaaagtttgtcatcaatgaaaaggctattctgtcataacaagacataagtaaatctgttatgcttaagatctgaaaaacaaaactgttatcactaaaaacaaatttgttatcactaagatactgtgtagtaattcatttattttaaagaaaaatatattataaaacgacagatttacaaacaagttaataaaatctttgatcacatataacaaatctatcatcattgaatttcattttatttggatgaaaaaactgcggcaacacgacaatttaaattgtaaaataataaatctgttaccaaaacagaataactttgagatttttctaaacaaatctgttacatacttgattttcctaaacaaatctacgacagaaacaaaataactctgctcttgtcgtaactaaaactaaataaatctgtggaacaagaaaaatctgccaatcaaaatctgtggtggacaaacaaatctgtcgtacaaaataaatctgtcgcaacataaataccaaatttttcaaattcgacaaaacttctggagtggcaatttcataattaaaagtactttttaattaaataagaattgcattcttgtaatatttgttttcctaacaaagcaaataaaagacattttggtctaaaaaattactcaaataacccatatttttgggatgtcatcctagtaattaactctaaaataggggtctccctagtttttcccctaaaaactatctaaaatccctaaaatttctcactcactacaccactataatgatctcacgatgttttgacatttggattcatctcaagttattttcaaccgtttcatcctatatattttaaaaccagaaacaacttcacgttctccttttagctctttttcttcgtctctcatgctttcaattcctttttttgtatatatttgataccgaaaatgaagtaagcaacagaataacaacattcaagtaattatctaaactttcacttaaaattagatcaccatctttcaagcatcatggtcgacttagagcacctccaatggagagagcccctccaagggttctctccattttttattgattaaaatttaaaaaaaaaaaagacaagagagctttgtatttttttctggtttttcatactccaatggtaggttctctgagcggggttctcttgaaaaaatatattaatataaatttacttatttcatacaacttaacaattattctaaagcataaaacattaaacattcgttattttaaaatattttaaaatagatgtgaaacaaaaacacataatgaagatcaattgttctgttgattgttgcgaatgttttttctatatatgctctaccaaatcacttttcaattgcagatgcatctctcgatcacgaacttgatttcgaatgccaataaaatctctgacatttgtaggcatagttgtagaatacgataaatcgacttgtgaagttcggttttctttaacgtgtatgaattgcaacatcaaattgagtataccaatctcgttcgtcttcaacaatcatattgtgcaatatgatacatgttcgcataatattccatattttttccttatcccaaataagagttgggtttttaataatgtgaaaccgagcttgcaatactccaaatgcacgctcgacatctttacggacggtttcttgatatgatgcaaataaagatgattttcgaccttgtggaagtcgaatagattggataaaagtcttccatttcggatatataccatctgtgagatagtaagccaaattatactctcgtctgttgacgttgaccttgtaacgcaaatttggagctcgaccttgtaaaatttcatcaaaaactggtgatcgatcaagaatattgatatcgtttaaggtacctggaggtccaaaaaaatgcgtgccatatccagagatcttgtgatgcgactgcctctaaaacaatggttggttttccagagcctcgcgtatactggcctttccaagaggttgggcaataatcgtttgggaatataggattatcactaaaataatcgttcatcaagagggtgtgtccttcttctcgttttctctcaataaaggcttgtttccgtgttttcttggtgccttcatcgtcactagccaaatcaacgaacatattatcgaattgttaatcaagtaattggtcaaagctttgttccatggcatcatcgaaaggagtacgggatgaagaagccatattgtttgaagttaaagaaatttaaagattgtaaataagaagaaaattgtggattgttgatgtttttgaggtagtaatttaaatgagaagaagaagattgtgaataagaagaagaagattgtgaattgtaaagaagaagaagattgttaattgttgagaagaagaagattgtgaataagaagaagattgtgaatggtaaagaaaaacatcaattatatataggatcggaacaaaacaaaaaagacaaacaacttgtggtcggaatacatgacaatacaaagctacaaacatacaaagctaaaaacaagacaacttgtggtccaaaatacaaagctaaagtttttaagaaaaagttgtggtcaaaattacaaagctaaaaacatacaagtggtggaaacatacaaagctaaaaagaagacaacaaagctaaaaagaagacaacaaagcaaacgaatcacatctctcttttggcatcaagtcgaacatgagttgcaagtaacgcttctttgtctgcacctgcaaaaaacccaacaaacacttgtgacatataagcccaaatatgacgtgacacataagataacaaacacattaatatcataaaactcatatcatacataacattaatacaatatcatacttgtgacacattaagacaaggaattaagaacttgaccttctttaagagaaggacttgtgacacattaagacaatatcatacataaactcaaaaaccaatatcatacataaactcaaataaccaatatcttacataaacatgaagtacatgtcacagctgtgacttaaaagcaatatcaaacatactagaagtacttagacaaaaatttaaaagcaatatcaaacatactagaagtaattagacaaaaatttaaaagttagaacatatgttacaaacaagaaggaacaagaacttatgaaaataaatccccaattagcttcttcttaagagtcaagtcgcagtctcaaagaggctcggtccttgaaagaagactttcaagcattaaatttttgctttccttgtctttattatcccactcttttttcttaagcttccacaaaaagttaaatgtcacactgaattaacttcttcttttttttcacgtttggtatcttcttagtttttgctttcggaaccttcacccgtagaggccgggccattacatcataatcttcaagattaataggctgtgaacttttagcttgagaaccaaccttccttcttttcgacattcttttctctttaggagtattggatattatccacttttgctcatgtcgcactagcctccatgcatgatccaaactgaacttcttcttcatatcattttcaaatagctcgttggcaaagagcattacatcattctcggtttgaccacttgctttctggtttgtttctgtggcataacatcccacaaacttcatgactagctcattcatcttcgcccacctttgcttacattgtgcagactccctctttgggaaaccaacaaggtctggactagctgcaacataagtagcaatccttttccaaaaagctggagctttttgttcattcccgaccacagggtctttgcttgtgtttaaccaagcactaataagaataacatcctcttttgctgaccatttcttttttggaatggccaccttaggagtgtttacatcctcatggtcttcatcagacaattgcggattgttctcattgttgtagctttcttgttgactttgtaacaagtccataaaaccggaagtgtaagaatccatttgagggtttttttggttgttagaagagagaaagaagggaagactgaatggttaaatgagaagctttttaggtttacaacagagaatggttaggttagaagggaagactttattatttaagctataaacaatttttaaaaactgttagcaataaaagcacaactaaagtctttacctaattacaacccactaaagtcttgtgttatgcttattagtcgtaaacaaggacaaccaaacatttatcacagagactagcaaacatcacagagaaaagcaaacaattactatgatgacctgatgtatatcaaccaaaataacaatacatgctttatagcaaacaattaaataaagatttaccttcattcaagtcggaagctttctccttaactaaacaccacttgttcagcattgattgctttctgtacttgatgatgcatcattgtcactcaacaaaaacagagaaaataacaattagcatttacatttaactttccaaattgattcaatgaaataatgcaatggaaatgtgctatataatgttttcttctattttctttattatttcaatgtatcaagattcattttctattaactttccaaattgattcaatcaaataacagctaatctcacaagctgaagcaatatactaggcaattaatctcacgttgaggaaacaacatagtaactatcagtttttaagtatggcgatgacttacaatatcgataaatgaatcctcactggctgaagcaatatactctcccgaatagttgaagcttattgttctcacgggccacctatgagaaatagatgttaatttactaacttgcaagagaattaaaccggtctgggatagaagaacataaatagaacaacagaaattattgttctgctagatataagttccaggttgggactcactcgagtttggtaaatgttctcaaacaaagcatgtctgagatatcccaaaggcttactaaagaatccgcactcctgacacagcaaaatatttgttatcctaaagagaaggaagggattagaagcaactagaaaattatatttatttgtgtctccgaacaatcaaagaaatgccaaattacaaaaaaaaaaggctccacatagatccacaaacactctaaatgcccttcaaaaaccaaaatccctaattaaaaaaacttaaccctaattttatttcaatctgaaaatcttggagatttaaccacaaaatacaaaactaaatcacaatttacacttgataattgcttgattcatacctaaattggagcttccatcacataattcatcgaaaatcatagatcattggtttttggtttgatcacgagaaaaagagagagggagagaaaagagagtggtcgcgagaaaaaagagagagagaaaaataggaaagaagggaagggtttattttttgttttgttaaatatgacgatccaatcatgttaagacacgtcgtcacctctctcactctcaaaaatctctcttcacagagccacctctctcaatgttactcattttcgaattattttttttccaaattacttcagagaaccccccattgtggatggcctttgattttaacgtgaagtatactaatgtttacaattattaatttattgtttttgattttttagtgcaaaacgaataacaccgacttcagattccagaacattaagagatgatattgtcgaagcaataaaatctatgctagatgagtgcaatctatactttaagatactccgaacaacaagggatcgtatcggtgattcattacaatcatcagacgtgaagattgttttgatttctaggcgtgaattaggggacaagaaatatactctccctacaagttctgaagttgatgtattagttgttggttgtgatgaaaatgacattgaacatagaaatatcctggtggaaacaaatagtaagggattggaaagaataagtgagcttcatcttagatatcttcccttgcaatatcctcttttatttccataaagacaatattgttataatattgatctacatcttaagaagacgacaacattgtcgcaaaacccacgattatgagggagtttctgtatataaaataattgagtgttatggtcaatttaatcctcttccacatttcgggaagctgtttcagcaatttttggttgatggttatacaatgatcgaagtagaaagaataggatatcgtgggaggacagataagtacatgatgctgctaagtgtgggaagcgaatagtcttaccatcaacttttatggaaggtgctcgatatatgcaagaaaaatacaaggatgcaatggctgtttgccaatattatggctacccgaatttattcattacattcacttgcaatcctaaatggccagaaattacaaaacacctacaagaaaggaaactaaaggaagaagatagggctgacattctatcccgaatgttcaagatgaaattagagaatctcatttttggcattcataaaaacaaactttttggtcattcagctgcaggtaagctacatttaatgttattctaactatttatctttatagattgcttttacatgatccaacccctaatctatcttcatcatatatacaaccgagtttcagaaaaagaggtctaccacatgctcatattttgttatggctaaagcgtggctcaaaattgccaaccacaatggacatcgaccaagtcatatgtgctgaaatccctgatcaagccactaacccagtccttaatgaaattgtcaaggaactcctgatttatggtccatgtggcttagcaaccaacgttcaccatgcatggaaaaaggtaattacactaaacatttttccaaggagtactgcaatgatacgagtatcaacaaagatggttacatagtctaccaaagaagaaaaaatgggtgatatgttgaaaaaaatggaactcccatagacaatcgttttgtaattccttacaatcctcatctacttctcaagtattatgcgcatattaatgttgaatggtgtaaccagagcagagatcaactatttattcaaatatgtgaacaaagataacaatgacaggatcaccgcaacattcgttccgacagtcatgtcgacaaatgaagaaggtacattaagggttataaacgaaatcaaacaatactatgatgccaggtaattttaataacattaaaattgattacctacctcattttgtttaccccaaaatactaacattacttttttttagaggtatatgtcatctagtgaacaacattgacaatgtggggttttgaccttcatcacagcagcacaactgtgtaacgattgtcatttcatttagaaggagagcaaaatataactatggaggatgatgatgacgttaatgaggttttgtcaaaagaaggaaatcaaacttcatagcttttagagtagataaaaatgaaccaacgtaacgtggaagcacaagaattgactgatgcagagtttctcaaacactttgtttagaacaaatgcacaaaattatggagcaagcataaaagaaattcagctgtaggtcggatgcatattatttcaccatctgctggtgatgagttttagttgaggatcctcctaaccaataaaaaaggtgcaaccagttttgagaatttacgtattgttgacggcattttgtatccgaggtttcaagatgcatgtggtgctttggttctccttgaagatgaccaattgtatatcaatgcaatcacagaagccagccgatggggatcaactaagtacatgcgttgatacagtgccaattgccttaaacacactctttcaaataagagatcagttgtagtatttaagggtcggatttccacaaagtccttttgttcacacaatgaattaagtatcaagattaaggtagaagggaatatgaaaaaataaaaagataacacagtaaacaaattgcagattgattggttgtgaagcaagataataaagagtcgggtttagggtattctcaggatactattgattagtagatctaatgataggtaggttgttatcgaaccatttttatactcaaactttaattttagaataacacatggcgttccgcgaaacttcctatgcctatagctaagattaccaaagaacccgagaaatcttatacttaagcatgcattataaacgagttcaattcagttcaccttagtaaataggccgattcttattacacacctaagaccaggctcatcaaataatagtttcaactacagtgacttcatacctatggcgggtatatctattgtctggattcaagttctagttaattactatagaactagcattaagaaaatttaaagatgaagaattctacagataacctagcaaagagccgatctactaaaccatatgaatccctaatgagaaaccctaaccttaacaagcaaactactcagacgtggagattaaaacaagcaacatatatgagtaagaaagcataaacaattcagtaaaagaaagagttagaaaagatctcttcactgtattgaaatctgaatgaatctctgaaaacaagggatgaatagcttatgtctctaagagaaaacttgataaaaagcttgatagatctaatgacctctaatactatttatatgacctaaaaaacgttcaaggagtaataatgcgaatagggaagtcttctgggcaaatttccacttctgtaaacttgaaagcgtcatggacttctcgggccaaaaccagggtcgatcgacaccaagagtgtgtcgatcgacactcttatctgaatctgaaagtgaaatcgtccttagtttccttttccttagtttttgctcaaaaatgtctcctcatctccattgttgtccctttccatagaatacctgaaaggactctaaaaaaactctaaaaataacaaaaagactgaaaatcgtatatctaaaacatagttaaaaacagtaaaaatagggttatagcatgcgtcaactattgtgaggctcctgacttcagagagtttgataacacctaatcatgtttggttagaaacttggcatttgcttacagaatatatgttagatatgcaaaaaagaatactagaaagatctggtatgaatgattaaccctttatagaaatgatatgttttattaccatcttttataactaacatattttgtataactcacatgactcatatgagcacatagcagctaaagaatcaagctttgcttgaaattgaaagcttttacggtcaaacggaagtacctttagtaattacaattcactgccatttcccaacttcaaccaacaaattgattactgaagagttgtattacaacatagaaaaatccgctacaaaacatcaaaagttgcttccagatcatataatgtgtaacatatgaacaaaataatgtgtaagatcatataatggcttctgtcaaaactaattttggaggtgtatattttgtttatgggtttggaggtacgggaaagacttttctttggaaaactttgtcgtcttgcatctgatctaaaggacaaatttgtattaatgtagcctctagtggaatggcagtcttactattagaaggagaatgaaatgctcattcacgtttttcagtaccaatacatctacataaaacttcaacatgttcaattacccatgtaaatgatctagctggattgctatttgaagctaagttgattatttgggacaaggcaccaatgttgcataaacactgtttcgttgctttcgatagaagtatgagagatatagcccgagcagctaatgttactaatgatgataattcatttggtgggaaaactatagttttcggaggtgattttcgacaagtgcttcctgtaattgctaaaggtagcagacgacaaattgttcaaccttctttaatttgttcattgttatggcgtttctgcacagttcttcgtttgacaaaaaacatgggtctaactattgtttcagatcctgctgagataaaatccatcaaagaattttctgagtggattctgaaattaggagatggaaagctttcagaaccaaatgatggtgaagctgtgattaatactccaagtgacatgcttcttatggataatcttaaccctatagtatcaattatcaataccatttatccatctttgattcaaaatgtagaagatgcttctttcttagggacatgcaatattatatcctaccaatgaagttctcgacgcgattaacaactatatcatgaatcttttaccaggagaagcaaaggagtattttagttgtgacaaaatctataagtttaatttttttactatcagatacggtaatgtctcaattgagttccttgagttccttagctcaatcaaatgttcaggattgctgaaccatgtccagaagttgaagaaaggagttcggtaatgcttttaagaaaacttgaccaaaaaaaggtttgtgtagtgagacaagattgttgataacaaggttgggagaacagatcattgaaccaagagttatctccgtaaccgacgacaacgacattgatgatgagaaagtttatatccctagattggcgcttacaccttcagatgttaaaatgccttttcgatttcaatggagatagtttcccaaagcacggagatatgggaaactatctctgtgctttggaatgacaattaagaagagccaaggtcagagtttatctcatgttggaatttatttgccaagatccatgtttaagaatggtcagctttatgtagatgtgtcatgaagatcctagttgttgatgatgaggggaaaagagatacaaaaacaactaatgttgtttttaaagagattttcaagaaaatcagagaatgatgactcatactctggtacaacctttttctctaaaaaaatatattcaattttgacattatttatgtattaccaaatgtttctgtaaatataacatttatctaattcccattttgagaaaattttcggtttcaagaatcttagtcggaagaatattcaagaccaagtgtgtttattggttgtaactctttttttttgtttttttaaatgttaatacaactatgtagtatttatcttccactttcacaaatactacgatccatgtagatttgctgattttatttgttaagtgtttctaaatttcctaaaccataacccccaatcaatttcggctttttgttttacgtattctaccaaggaaccttataaatcatgaaacgaaggtctatatataataaaccaaaacaaataacaaaaagaggtccaaattgaattttcgggcttcataatttttaggcccttttcaataacatcttttgagtagaattattataaaaaaacctataacaaatatttgtattccaaaattggctgacactaacactacaacgctttatttaaattgtggaacattataattgattaatttcctatttaactccacttatattcatcttcttctctgctagatctatctatctattcatcttcttcgttcctttttgttgttgccatagtcattgactattaaagtctatccaggttaaaactttaacttttgtgcaaaaaaacctcgaactcatccatttttgcaattttactctccacctccaacatatgtagattaattctatgaaatctaaatacgcattgtatcctttttttgctctttttgttaccattaattttgtaaaatattgacatataatatgttaaatcgaagccctcacgatgaatagttcaactctacctttaaaattataagattataatgtatatgatcattaaaatggatgagttcgaggttatatttgcagaaaccccttatttatttatttgttcattctttttctctctaacacattaattctaatttcttcaatctagttggcagatgcttgtgaattatacacatgattctaagcttttggagtggatgagaatgaaccaatacaacacggaataatccatctgacttacatggattttcctaattaatttgtttggagcagaagcactaaaacgtggagcaagcgtaaaagaaattcggctgtgagacggattaacctttttcaccttctattggtgaaaactattgcaagaagcttcttctaacactttataaattgagctaattataaatctttaaatttatatagtttatgttggcgattcaattaaaagtgcatttaagtatttataaattttataattttgattaaaaacaaatggtactcgtgcttgtattggtgataatattagtttatttatattttcgtgtaacatataacatattttctataactcatatgacattattattctattattttactaggtcatttaaaaaaaatgaaaatcgtgttataaaatataacgcatataaatatattattattttattatatgaattatgttgtatttggaacattataagagaagaaaaaaataattcacttcttgttcttattcatttcaatgtacaacaactatttacagggataagagacttggagttcaagtgacttaatgtccaagtcttaagaatataagatgataagatcaaatagtaatactcccccttgactatccattacttttgatgagtaacgtactgactcgtcaaaaccttatcaaggaaaaatccattgggataaaaaccatgataagggaaaaagagtacagtgacatgaactccccctcgaaaagacttcacaagtctcatagatgacgcattgcaatactttgaacatgctttataaatgtagaagttggaagcgcctttgtaaatagatctgttgcattgtcacttggacgaatgtattgaacgtcaacttttttattcttctcgagttcttgagtgtaggagaagaattgtggaggaagatgctttgttgtatcgctcttgatatagccttctctgatttgagcaacacataaagcattatcttcatataatcttgttggctctcttttgatggctactccacttgcttcttgaatatggttagtcatggatctaaaccaaacacattctctacatgtttcatgaagagcaataatttctgcgtggtttgatgaactggcgactagagtctacttttgagaacgccacgagattgcagtttctcctatggtaaaaacatatgtggtttgtgatagagacttatgaggggctctatatatctaaatctgcaaaaccaactagaccaaactcggggtttctaaaataatataattttaaatcaataatactttgaagataacggaagatgtaatttatctcattctaatgccttcgtgtaggggatgaattgtaccttgcaagcaaatgagtagcaaaagcaatatctgggcttgtagaatttgcaagatacataagtccaccgatagcacttatataaggtacttcgggacaaacaaattttttcgttatccccacaaggtctaaatggatcattttcaacatttaaagatctattgaccatttgagtacttaaaggatttgctttatccatattaagcgctttaaaatcctttttgtataattggattgatgtacaaatgtaccttcttgtaaatgctcaatttggaaaccgagacaaaattttgtcctttcaagatgagttccccttgaaatataatccaaataacaacactggtaattcttctaatatatattgtctctcggctactatgcaaagatattcaatgccatctttattcataatctctatatgatattcattactttagatatctttgaaacttatcaagtttttatgagacttaggagaatataatgcatcatttactttaaaatgagttttctttagcattgtaaaattggcttcgccaaaaccaataataatctttgcatgaccatatatagtactcacgcttctatcaaaatcttttatttcgggagaggagaagtacgttttatctttaaagattgtgtgcatagaagcattgttcgccagaaagatatcttcatcctcaatctcatattttgacatttttctggaaataaaatatttgttcattaaaagtttgcaatagactattcatatgtcataatatattacaataaaaatattatcccagaaaacaaaagcatccgcaatgtttgtcatacatagcatgatcatacatatagctataatatattacattgatttctcgttgtcatgatcaatagagaaaatctgccatatcaagatgattatcatcatcttggcatttaaaagaaggtaggatccccatgttcatgttttcgtttgacattccataatgttaagaagcatgcttcaagaaccacaaagtttaatatatcatacaaaaaaatatttaacgaatgagaaacatatgatgtgttccaaataccacatatcggcaaatggctattgtgttagttaggaagaatgactctttataaggtcgtatctagatctcgtgaatgattattgttacgagtaaaatacacataatagttttacgcttaatatagaccgcaaatgcacagacaaactcaagagtatttaatgatcgaatccacatagactaaagaaacatacataagacttcaattaatctaggataacaacgagttacaataactcatggagttttgcataatctatcaataataacaatatgaataaatgtcttttgcacttccgaatagttgtgtctgttaaaatattattgacgtttacttttttacatttgtgtcttttcatcgtaaatagttgtgtctgttaaaatactgacagttacgtttttacattcttgtcttttcattgtaaacatttttgtctatttaatattgacggttatgtttttacattcatgccttttcatcgtaaacagttgagtctgttaaaatatagacggttagttttggttgtaaagactttgactttaaattttggctgtacaaactttgactgtagagactttgactgtaaaaactttggctgttaaaatctgattgatagaacaaaactgtagaagctgtgactgttattttttaggattatatatattcagaataaatataaatatattataaatgaactcatgtgataatataattttattaatgataagaattttaaaaaataaaaatatcataaataaatgcatagaaaaatattctaaaaaaaataagggagatttgcaaaactaccctttttttactacccttttgcaataatacctttttgtgttgtccatttttaaaaatacacatttccttgaacagaatgaccaaattaccctcatccaataggaacatgtaataggaacaagtaataggaaactaaaatttttccgccaaatttttggcgccaaaatttatttttcccgccaaaacaaaatttccgccaaaataaaaaaaattcccaccaatttttttttcgtaacaaatttttttctcagccaaaaaatgcttttaaaaattcttgtaaatttttattggcgggaaatagatttacaatggattttaaaaggattttaaaatatttacaagagattttaaaagggttttaaaatatttacaagagattttaaagggctttaaaagattaacaaaagttttttaaagatttttaaaaggtttaaaagtatttcaaaagatttcaagggattttaaaagggttttaaagatttacaagggattttaaaaggtttgaaaaaaatttacaagagtttttaaagtcttctaaaactccttgaaaatcccttgtaaatattttaaaacacttttaaaatcacttgtagatattttaaaacccttttaaaacaattttaaactctttaaaaatcttcaaaaaacctttgtaaatcttttaaagccctttaaaatcccttgtaaatctttttaaaatccttttaaaatcccttgtaaatattttaaaactcttttaaaatctcttgtaaatcttttaaaccccttttaaaatctcttgtaaatattttaaaagccttttaaaatcccctgtaaatcttttaaaacccttttaaaatcctttgtaagtctattttctcgccaaaaattttttttttcggaaatttttggcgggaaattttttcaaaattttttttggcgggaaaattttggcgggaaatttattttggaatattttaggcgaaaaatattaatatttcattttattaaccttaaacaatttccaaataggggtaaaatggtcattaaaaatttaaagagggtagaaatgaaaatgactaaagaaaaagagtaaaattgaaaagggacatcatgaaaaggacattagaaagaatttttcaaaaaataaacgaaatatgtattattcattcatgtttaataacctaacattgcattaaaaagtggaaaaactaaaaatcaaattattaataataaaatatttatttaaaagaaatgacaaaggttcagaactaaaataagaaataaatattctaaatgaacacatttataccaatattaatggtgattatgaaaataaaatgattattattaaaatggatcttaaaagaaagattgaaaaatgataataattaatttattaaatactatttgtgaaacaatatttgtaaacatgtagaaagattctaattattattaggagaagaaaaataaaagtttttaattattatttattttaaagttttattatttatttgaaagcctcatatttgagacttcagtaaaatgaacgtaaaaaaaaaaaaagtgggctctcagactttaaaaaaatctaaagtcctaaaattatgattggtaaatatttaacttttaagacttttaaaaaaagctatagtccttaaaatctcagccaatcacccccacattgccggttatttttttcgttgtctttttatcgtaaattctcataaaactgtattttcatcgtaaacagttgtgtatgttaaaatattaatggttactttttttcattcatgtctttttatcataactttttgttatcattaactgttattttttcggttagtgtctttttatctcaacttctcgtaaaacagtatttttatcgtaaacagttgtgtctgttaaaatatgggaaaaatttcaaaacaaaatcgcaaactttcaaatttgggacgaaaaaagcaggaacttgtgaaatgccatttaaatcacgaaattttgtttgatttttggataaaatagtcaaattttgttgactaggccattttggtcatgtcgttatttttccgttaacgaagttaaatttccgctagaagtttcagttaaatcgaaataacgtcgttttgaaatctctaaaacgacattgttttatcagaaaataatgataaaaactgcatcaatgtagacttgaactgtaatatttaacggaaatttaactccgtcaacggaaaaataacgacatgaccaaaatggcctagttagtcaaaaaaaattgaccattttatccaaaagtcaaacaaaaattcgtgatttaaatgacatttcacaagttcatgcttttttcgtccgagatttgaaagttcacaatgttttgacatttttcctgttaaaatattgacggttatttttttacattcatgtcttttcattataaatttttgatatatggttatttttcgttagtgtctttttatcgtaattcatcataagtttttgatatatggttattttttccgtttgtgtctttttattgcaactttttgataaatatttagggttatttttctgacgttgtgtctctttattacaactttctgttataatattgacagttatctttttttgtttgtgtctgttcatcacatctttccttatgaatagttgtctacataaatgtttgtaactattcaactctatatattcatcagtcttcttaaaaattctaaatttttgttctttaccacagattctttgtttcatgatgaattaacaaaaaaacccaatgtctttacatttctgaagagttttgtttttttaacgaaatatttggttaaaatgttaacggttacttttttgggtatgtcttttcatcgtaatcttccactaacattgacgattgtttttttcgttagtacctttttagtgcaactttcgtttgtatctttgtcatttaaatattgatggttcttttttctttgtgtttttcttatcgcaacattttggtaaaatattgacaattacttttttagttagtgtcttttcttcgtaactttctatttacattaatggttattttttagggaatttgcaaaaggatcttttttctactaccattttgtaacaataccttttttgttgtctatttttgaaactatcctttttcttgaacaaaatgatcaaattacccttatctaatgagaacatataataagaaactgtaaattttccgccaacaattattggcggtaaaatttactggcaaaaaatttattttttggaatattttaggttggaaaactcaatatttcattttgttaacttaaaacattttccaaataggggtaaaatagtcattaaaaattaaaagagggtataaatgaaaatgacaaacaaaaaatggcataatggaaaaggggtagtgttgaaagggcatttttagcaattatttttattttttcctttagtgtcattttatcgcaactttttatttgtggttttttcatcgtaactttctgttaatatcgatggttattttttcgtttgtgtctttttatcgtaatttcgtaaaaatattgacggttattttgtggttgtgtctctttatcgcaagtttcggttaaaatattgacaagttttttttattcgtatctttccatcgtaactttccgttaatattcgcggttattttttcggttaccgtctttttatcgcaactttttgttagtgtcttttcaacttttccttaacattgattgttatttttccgttagtgtttttatcgcaaattttcataaaaatattgaaagttaattttccttagttgtgtctttttattgcaactttccgttaaaatattgacggtcattttttcgattgttttatttatttaaaatttccgttagaatatcgacagttactattatcgttcatgtttcttcatcgtaacttttcgttggtttatgttttgtcttcatcgtaatttctttttataaaatgtgatttgttttaaaggaaatcattatataatcatatttagtatatttcccctgcgaggggagggggtctgagtcctacttataattgacaataaaaatacataaataaacttatataataaaataagattttttcaagttcatgctctaaaaagttgacaagtggcgctatatttatttgacatgtgtcatttgcgttaaatttaaatacagtattttcatattcactttgtttagttatagttttctgctaaaacaatctcttaacattttgcaatgccctttttgtaattcattatttttcctaataatgtatcatttatcaatatttcattaaattaacataacattagaatttcttaggaattaaagaaaacaatattagttttataactttcaagccaaagatctaataatttttctctaaaataacttcaagataaaaatatatatgaatatattataatatgtgtttgttgacaatatgatattttatttatctttaataataatcagaatcacaatttattgcatatttattctttaaaatgtaactcccataatgtttgacaaaataaaataactcaacatataaaaacactataatggattaactaccatctagtttatgttttagtggaaaacatatgtttttacatttacaacaaaaagaaacactcaaaatatttataccatattgtactaactgtcattctctttatatcttttgtggaaaacatattttattacattttagaaaataaaaataaaacacaaacaaaaatatataaaaaacacaatcatgataatttatatttctttagtaatataatcacattattttttttgataactcgatcgggtgatctagttcaatagacaccacaatttccgagccaggttgcagtgatttttctccctagatggttctcgggtcaacggggcatgagatctgagtaatcccggggccaagaggaggcatatgaaaaaaccctcacaccacacggaaagtcacccatccttagattttcccagcttaagcaagcttaaccgtggagttctctcaggacgtttgaccgaatatataagtatactttggtgatatagtcggtgaaatcacttcttttaaacctctacgcatacacaaccatattctagaaaccggggtattacatttaccttcactttcttcttcttcttcatgttttgaagttgacaaatattatttacaaaatgcatgtttagtcaagttgctaaaattcatattagtctttaaatgtattttagtttttcagtcaaaagaccaaaagtgagtacttaaccaaatgacaaacatatctatataggcaaatgttcattagatacataagatatttccaggttggtgctcttaatatattcaccttttatttttatttgtggttacttcttttcgtttctttcatttagtttaaaatttcaatatacaaacatttctcctatttgtatacacttaatttatttttggtcaaatttttaaaattttgatctttgcaaatctagataaaaccttatgtactaaacatgaacttataactcaatttactgatcataacaattgaaagagtgtttatctttcacttatcatgttgaactaggtgagtgcccgccctaattaaaaaaaaattaattaaaaaaaaaaattttgtaatatatttaatttatcaccctttttaaaaatgttattttataagagaaattgtattatgaaggatgaaaattagatatttcttattaagtactgcatattgtttgttaatttttactcataggtagaagatttgagtgtgttgatgaaaccgcatagtccagtgttgtttgaatattaataaacaaaattacatatatatatatatatatatatatatatatataagtatgtatttatttttgttagtatttaaactataccgcacttaatccatagtttaaccacatctctaagcctaatttataggtatgttatatatacttttttttggtattggtaagttgtaaaggattatagaagagcatcattttagcttactcgtgcatattttaataaatttaattttgtttttaacattcgttttgttctccttttttgttcttttgtaaaattgtattttaaaataactattgttttcaaatgtttgctacttaatttgttcgtattttgatttcttacccatatatatatatttattgatggatggttaacaattttaacaatattttgaaactactctatgcaatgattggtaatataagagttggattttattatatttaaaaattctctgcaacagcaacagaggaaaaacatgaaagtaaaaaaaaactacttgaatttatttattttgaagctttatgatagttcattggctaaaacattattggtgctaattttaatgaaatgatagttgctgaccaaaactattgtaataataataatttaaaaaaaaacagtagaaaattattattgaattattgttttgtgttttggtatttttgtgctttatccttctatcagcctttacttttttaatataccctaaattggtccgacacaaacaaagactttttatgcttcagccttcaagtagggatttgttaatcgtctatcgatctatgttcatatctaatttaatttgctttactgttgtttgacgaattttatctcgtcggatggctttcgcaattctccgttgtttcttaggatgattaatcgtcaaatctattagttggaactaagccttctgtaaaaataaaatatcattctggggcatcggtgaatcaaatgatcaaaggttccagctactgttgtcggtacattgaaaggcatgcgtctggaatatcaaagtcgacaattcaacatgtatacatagtatgttaagatttaacaaaaaattacattcgaatatctgtaaatttcatttttctttttctgttacaatttaaaacatgcacctaatgtattattatagttgtccaaattaaaaacaatttaatttgttttaaaaatttgatttgaaaaatgctaaataatatgtttatatgacaaacaaatggattttaactacaactactaagaagtataaaacactcggccatatatatacgaaaaccaaaccaatatcttcactctcttttatcaaaaagcttttaacctcagctgttcaataattcaccaatcatggtgaccagaaacatcgccttttatggattccaataagaggtctattatctgaacgcacttagggttgtgctctcagagtttatctcgactttgatcttcgtcttcgctggctcatgctccggaattgctttcaacaagctcactaacaatggagccaccactcctaccggcctcgtcgccgctgccttagctcatgctttaggtctccttgttatttgtttctgttgtcgctaacatttctggtggccacgttaaccctgtcgttacattcggtgtctttctcagtgtgtcagaggtaacatcattctcctcagtggtattttctacttgattgctcagctttttggctcagtcgccgcgtatttcctccttatctttcccactggtgacgaggtaacatcacttattacacttattgccttactaaaccaggttagtattgttttcaatttgattttagttgtaatttcgattattggtttttttcttcttctctattttcttcacagttgttattaaccaagaatagtaaatatttaagattcgtataatacaataatgtttctattatatttataatttcaagctgagactaatgttaatatttagatattttaaatagaaaatcatatgtttagtaaatatttaccaggtaatggaagatttgtgttggcaaaaccaaccaagtgagcgtaattgtaaactttaaacccaatcgcctatgtctataatcataataatttaatatctttaataacaccataccaacatatatgaacttcatacgttaaaaaataacttgaaagaatcacaatcgttataatttaccgtttatttttcttcctatcattttataaaaaacaactatattttctaattgatcgacacacatttcaccagctaaatttgttatgaaatcaacatgttagaggatttgttacaaatttaaggttaatagtgctcaagaaaatatttaaaaatatagaaagagtgatggttgaagttcttacttatgataggttcatatgttgaattaattactaattatattttacttattttaataagtctaggtggcaagctctcatgtgctgatgtgtcaagttgtgggagagagttgagctcctttcatatatataatttacgttatattttgcctcttaagttttgtagtgaccatcataatttctcttttgatgtctttgtgggcaaatgaggtaatctagaaagaaattacatggatgaagatgatatagaacatacgagatctgatgaatgacagattactatagtttttcttttccctagttaatgttgttaataaggggataattttgctaaatttggtaaaagtacatgaattatatatgatatgtgatttagtcaagaaaaattatgtgaacctgattagattttaccatgtctcaggttttcaagaatgcaatttttatttccatggactagttgaaatagttacctataaaatatcttatgacataaatcgatctagatatgatctacatacaattagaacgcttaaacgtggaaacttaattgatgatatgctttatggtgatcaagaagaagatatcaacaaagtgttgagatactaacaaaaatagtttttttttcttgttgttataaatattgagtcagactttaagttacacgtatttgcaaactatagttttgtgttagtttttttgatatcaacacatttctatttatttggcaacaaaatacttttcataagagcatttctatgtcatatattataatttatgtgataaagataaagatcacgatttcccgattgacaaagaaaatcttatgaaatatggaaaacatgatatgaaacacatcatatgtttctcattcgtcaagtattttttatatgatatataaaactttctttctttctagaatccatggctcttgtataaggtagattgtctaactcgttactctagatagtatattatatgaaatttgtttcgtaaatatttttccttaagattggactaccaattatgaagtaatattttaactaatgtgtggttgacaaaatatagaaaaaatcaagaatccaaccacatgttgagaaaaaaaatttctacttcaaatacacttacttatttttattatttagtcaacgaaatattaatttatttatggacatatttttaaaaataccataaaattaatttttgttataaaacattattagtagtttatatttttttgaaagtaccactaaaatatattattttctgaaaataccacaaaattacttttaaagttttcaaaactagatcctaaactctaaaaaataaaccctaaaccccaaaaaacttaactcaaacccaaacatttaataaattataaacccttaaaatcaactttttgtgtttcaagtattttttgggtatctctctaatttatttatttatttcagattgctcaaaagaataaataaataaaagaatttggctgtctcatttccttgttcggaatcggagaagaaggaagactagattcgatgtgttggtgaagaagatctcgactttgttcaaaattccaatttcgctcgcctcaaagatcattctctcatcttctcgactttgatgcgattgattaaatatggtggatacggttattcccggagatatggcttgtttggatgcagatttgttgcagcttcaggaaatgtcttcctttgttctcaattctaaacctggattcactcagaagctcttcgaccagtggctttctcttcccgaagctcagcgacaggtttctgctttttcactattcttacactcatgcttcttagcttactctctgttagttcgaatctttctttcgtaatgttacaatgatacttcggttgcttacttactctgtggtgttgaggattggtgtaaagtttgaatctttctttgatactgttagtgggtattacagtgatgccttaggtggttactgatatttggttgcttaattactctctggtttctgttgaggattggtgtaaagttgggatctttgatagtgttagttattacaatgatgcttagcttactgagaatggtgtaaagttcgaatatttctctgattgtgttagtgagtattataatgatgccttaggtggttacttagattcggttgcttaattactctgtggtgtaaagttcgtatctttctttgatagtgttggtgagtgttacattgatgcttaggttactgagatttactctgtggtgttgaaagattggtgtaaagtttgaatcattttttgattctgtgagttatgacgtatattcttattttcttatgtgagtattacaatgaagcttacgttaatgagatttgtttgctaaattactctgtggtgttgaagattggtgtaaagtttgaatctttcttggattgtgtgagttatgacaatgatgccttaggtggttaatgagatttggttgcttaattactctctattcactggaatctctagtctaatctttttctcgttggttttctaggttggatcattgcttaaggatgctgtagctggagctcctatcaatgttactggaagtgcatcgggttctaattctgccactataccatctatgtttcctgcgggaagtgctcctccgctttcaccaaggagttgtggttcaccccgtacaaccaaacagagagccccttctaacttaggttctactctcaaagtagtcaacgagcctgttaaagagcctatacctcaggtttcttttcctctttttcttccttctttatatatatatagtaatggaatggagttaactcactgatttcttaacttgaaatgattctagttttatttccaaaatggtcgccctccaccaagcgagattaaagagcaatgtatgtttagaatcaatcacttcttttatggtcacatggatggcttgcagatacaaggttagaagtcagtcatttgttttctactaattatatttgaactgtttattaacttttttctccattttcaatcaatactcagaattcaagttagtcaccagagaaatctgcaagctcccatctttcttctccacttcccttttccggaagatcgatctcaacaatacaggttttgttactaggtgtgtgccgcttcttctatgctttttttttttttgtatggtgcttcctcttcatgtctgcatagtttactgaaacaccacccagtataacagtttttcgtgtttgtttctacagagatgcatttattgatttttgggtaaacgggaacatgttgataatggatacaacgacccaaatcttcaagatactaaagcagaaagatcagagtttcattgttaaggttattttcttttaagatttgcatattcagtcagtcatgagagcgagtttattatattccagattcttttctttttttcatggcaggatgatttcaaaccactactcaaagaactgttggcgacgcatcctgggctagagttcctgcaatccacacctgaattccaagaaagatatggttaggtctcaactttatttacatttttagtatcctaagttatctcatgttttctttttccgcttggtattgcttgagtaatggtgtttagtaattgagtttggttgtgcattttattctttgaagtatattggtagctacagccctagttgagaagaatgagtgaataagtttgccactttggtatgatgtacttatctaaatctgtcagatggttaccagatcaatagtatttcttcttgatattgcttgagtaatggtgtttagtaattgagtttgattgtacattttattcttcgaagtatattggtagctacagccctagttgagaagaatgagtgaataagtttgccatgtacttatctaaatctgtcgaatggttaccacatcaataatatttctagtgaaataaataattttgataattgatgcatcgagatacagtaataaatgtggcattactctgtatggattttaaaatttttataagatacggtttctttgttttgttgtgttagacatcatcttataacttgcaaatccataaagctttcaagcacggaatgaatcatcttcagtctatgaatcctgcagatataatcaatatcagaaaaaataaattctggagcttgtttatgaatcatgcgtcagttagtaatgaattcccgagaacactttgattgctttctagatatctggagtccatattctttggtatttgctgctaccggtatcaaagctaaatttttaaggatgcttttctgtctgatacaatttgtattttgctgaaacagctgaaactgtcacctaccgaatattttattacataaatagatctggcaatggtcgaattacatttagggagcttaaacggggaaacttaattgatgctatgctacatgctgatgaagaagaagatattaacaaagtgttgaggtactgacaaaaatatttgcgtgctattgttgtatttatagtattgtttttgctcatttaacatcacttttctattcactttggcaattagatacttctcgtatgagcatttctatgtcatatactgcaagttctgggagctggatacggatcacgatttcctgattgacaaagaaaatcttatgcgatatggaaaccatgctcttacctaccggattgtcgacagaatattctcccaggttctgtctaaaaaaccttgctctttaatgcctactacttgaagattttatttatattgcttctattttaagagttctttcctcgttcaaagttattattgctcttaagatgcattggtttcttctcaggttgctaggaagttcactaacaaagttgaagggaagatggggtatgaggactttgtctatttcattcttgcggaagaagataaatcgtcagtgcctagcctagaatattggtaagttgtgatagaagggtccgaaagttgcagacagataccattttaagtcttttatctgacacaagtatacgttggactaggtttaagtgcatagacttggatgcaaatgggattattacgcgaaatgagatgcaattcttttatgaagagcagttgcatagaatggagtgcatggcgcaagaggctgttcttttcgaggatatcttatgtcagatgattgatatgatcggacctgaggttcaacaatatatctcttgttttcttctttctatatttagtatagtcacagaagtagtttgtgttcccagttttctttctgagtcttgtgattttgttttgtgtttgattgttttttatttccttccacagaacgaaagccatataacgctgcatgacctgaaaggctcaaagctctctggaaacgtcttcaacatcctatttaatctcaacaaatttatggcatttgaaacccgggatccattcctcattcgtcaggtactaatcatctaatttaccttgctacttcttcacaccaccacatgcgtcttataacatttctaatgtcaaacggaaacaggagcgagagaaccctacattgacagattgggaccgttttgcacatagagagtatattaggctatcaatggaagaagatgttgaagatgcatctaatggaagtgctgaggtttgggatgagtcgtcgctggaggctcccttttgagttcataaaggtaagtcaacggaaaaccgtagtgtctagaagataaaactagtggaaaaggattagaaaaaaaagaaactgaaaaaactttgatgttgatgcttgtgcaaatgttattatttcataatataacttaatcatgcagaagagaaatgtaaagtccctgagaagaacatttggagctttgttgaggaaggaaagtgaaaaacaaacgaaaagccggtagtatcctctgttgaataccatacttagcttggatttgttttctaacttctctttatttgttagctgattctacagttatatttattaacaatcgtctagattttacagtcttcttcacctgtattgcattcactttgctctgatgtttctatctctgggtgttacttcatcatctccagatgttgagacttgtgaatttcaatgctatagttcctttaatttttggttggttcctgaagacacaggatgtcactgagatgagaagaggttggttgtgttattactattgatcttgaagtgatgtctttttatttgtgaaattcttaaggaaaagccactttgctctgttcagttgatcttcaaatcttcacatcggaatcggtttagttggtttgcggttgctctgaactgtttgtcaaccaaacctccctttattatactgaaaactctttgtgcaacagatgaagaaaaaaggagaggagtcttattatgtacatagtgtggaactcgcaaagttaccagaaccgatctttattgacactgagataaccagacatgactttcccacccgtattcctcataccatcgatgaggaaacaccaagtggaacccaatgctccgacgaagaaatcagcttctgacgccattaagaagttaaccagaggatagtttgtgctcatctctctcccgaggctcgcttcatactcagccatcgacttattaccgacttgtcttgccacttccgtgtaatagaatctccagtgagcataatctttacttctgtccaccacttccttcatctctgtagagagccagatcctgttgagctctggaaaccgatctctgatccgatcagctaaatgcatgtactcttctaaagctgcgactctcatctcgcatgctttgtctcccatccgtacgtgaacactcagcattggccttggaagccacggcttgtgatccgaccacacctgttcctcaatctctgtcctcatcttcttattcttctttctccaatctccagctgaaagaacaatcttggcagcttcttttccaaacgcggaatttcgagcaatgttcatcaaaccgcaagtgtattctgtttgatatctcatcaagtatctcactgcttgtgctctccaccatctccgatccattttccgatgattggagattaaacttccgttgatttctgtagttggcttcatataactccaaggcttaccccattgctttggtatagccccagcccaaatctcctttgtgctataattttgtttccctgtaacaatcccactctcccacgcttctctcttcttcacaatcgcaaaggctcgttttcgacactcttctgacgtttcctgtagaaaatagcaagaccagtttccacgaaaagaacctgcatcaaaacaaaagagaaacaccaaatcaaatccaaagtttggttcttatatacacttttcagcgtctaaaacatcttgataagaagattaaccaagaagatgtaatttgtgatagttgctgctatatgttagagtgaagactcaaaggattaaagcctttatgtacctttgcaaccatcatgatctgctcggttgtagtaatttgcaacaagcactcggttttcatttatagctatcgcgagtagaccagtcattccagctatctgagctcctattccaaaaccaggaagtgtttcccaatcagctacaaggaacttgagactcttgtttccgcaatccaaaggatgctgatgaatccatatatctctttgcactctcctcgttaacggataattctcttcatctcctccactgatctaaaacacaagcttttgattgttcattcaccatactaattgcttgatgacaaagaacaagaaaaagaagaagcatacccaaggaggaagtgtccagttcgccaaacgtgtatccaaacgctccctaactcgagccttctcctcacaattctccaaatgtggaccatttggtacatcggatttgttaatacctaccttcttcaagaagtcttcttcatttagtaataaattatcccaagcagagaccaaaagtttcacttcatcttcttcttctatctcaactttgttcttccatttcagtttccggtctatacttgcaaccatatctacatatcaacaaattttcattaccaaaaaccaaaaaaaaaaacatacataagaagttaccaaaaatcaaaatctttgagactcactgatgatgtgagaggtggaggaattgcaaggaggaaaaacagaggaagaggaggtgaaggagaaggcggcgaattcgaaggtgccaagagaagtgagagcagctaagaagagtgaagtgagacagattccacatagaaacccaactacacatatttgacatggaaatgaatttccaagttttaatgctctctctgaaaccactctttctaatgacttcatgctcatactaactctagtttttctctatattggtcactaaataaccaaacccaatttcttctccttctattttgtaactgaaattttttcttaagaaaacaaaagattttctcggaaaatgctttcttttgtagccacacttttaccaactatcaaccagaaatcacatgatatttctccaactttttgtttcttttctaagacaaaaatatatcttttgtggaaaaaaagaaagatcaagatggttctatcaaattaagtttgtttcctactttcatcagtggtccattttcttcatttcctgcaacagagaaaataacaaaaggtaaataaaaattctcattaaaatagatcaaaccataatgccataaaggaaaaaaaaaaacaccttcaaaatctgatgaaccttagtacaattatcagtctttctagctgaataaggaaaaaaatttgaatattatttaacaaggagaaaagaagaagagagaggagaaacctatgaaacggattgttatacaattatggagatattaaaggagagaagagcataaccgttgagcgtatctagacctcaattattttaaaaacatttttgaactgtatttaaaatctattttccattaaaaacaaagggaattatgaatttcgatgaaaaaatgacacttggattataaagagagaaagaacaaaaagccttttaaccagctggtctgaaaatgaggcagagaatcataacacaaatccactacatacaagcaaagaatccacccacaaagaaatatctgtggacatttgtttacttataattttgttgaaaatcatggaaagggaaagaaaagagaaaatgcattgagaaactaactttgaagctcagtttcttaggacatagaagtgacaagagagttttgatgtgagcgaggttgtgttttgttgtgttgtggcaagacgtaatattgtcactctttttgtttttttagttttcagttatttattttgatgtttggtgaagcaattaactacgattcgtatggttccatgaaaaagtagaaatgacttgatttaaaagtttagtataaaacacgggataataatgagaatttctcttctttttcttcctttgcgtatcaacaaattgaatggaagcctttcctcgaaaaaaaaaaaacaatttaaatcatttttaaaaaaaatatataaagcacacttccaattggacataggcctagcaaatacaatattcttttttttttttttctattttatatcagatattatttagagctaagactaaccaaaaatgtgggaaattgtttacataagtaacgtgaagcggttcgacaatattcaacagttacaaaacagaaaaaattccggttaccggaaaaagagaaggcatagttggatttgggcagtgaaacggaggcagcgaacagatctaataatactgtcgtatacaaagcccactactttgcaacacagccaccagagcgacaacaaggaccggagcatatgaatcctgacgcaaatctcttatcaatgaccggacctgcaccaagctttacggaataaatccagtttccgactctcggccacccaatttggtcgatcccccaacctagcaaaatgaccactcatttccaagcctctgacctccaaaaccgtagctctgaaaatcttccagaagcaaagcaatcttcaatctcgtccgatggagacaaaaacacggcggttagggaagggtgaaggctcagacaacccctccacaaccaaatcccgcataagccatctcagatccaaaactggatctgccgttaaacatcaaacacgcaccggaaacccacctatccgcagcgtcttccgccacaactacagcttctatccgatcggttgagccaagaaagactccaccgatcttcactgacatccataaccaggaagacttggaagagaagcctctcgtccgccaagaaagggccaccgctgccacgctaaacggaaaaaccacaccactccaatgtcggagaagtaagcttgcctcactcctgcatcatcttgcaaatctaggacctaccatgaagaacgaaggtgaaaaacaaagtagatctaagaaattgaaaaaagcttcagaaagagagagagaaatgaacagtagaggaacgattgtccaagtgaaaaaatataccaacaatttaaatcatgccaacggtatattattgttttatttttgatatctttgtgacatttattgtagatcgacattgtatctcggggatgtaatgaacgtgaactttgataatcaatgattaaaacgtgtttggaagcatttttctttaagagtattatccttctcaaactttgggttacacgaaatatctcctaagatatgacaatcaaagtactttatattgttctaggctagatacaagagaaataaataaaagttttgtgtgtttcactaaagattctctcaatctttagtttcctgaatctctcttgttctctcttgtttactttgtttttaacacaagaaaacagagttatatatggtcggaaagttataacgtatgtttgaaaccgtacatttataatataaccataaaatgaacaattgcaatggttaaataaataaccgttgatttaagtagtttacacttaaatatccaacacataaacacataaaccaaactcatgcataaatataaatatatagaatttacatattagtaatattacacatccaaacttaattgacgatgtgcatcttacggattgaatccttcgactcatttgaacacatgaagataaaacacacacgaattcacccactagtctaagcgtttagccttgacactattataagttatgtgtccttatccttttttgagtgtatacaaagataagtccgagctttttgaagccgctacacttcaaactcatataggtagatcttttaatcttttgcacctgcaaaatgtaatttttcaaaagatctattaagaagaaaagtttaacctaacattttcttggagatcgaagcacttactttgggatgatataaaccagtgcttcaatctctaagtatgggctttccgaattgaacttagcctctaacgttgtattagaggggaattgggtattccacaattaaaaagtctaaatggactttaatcccactcctttagcctacttgatcaccatgtctctagctaatccttttttttaagtgatccgctagattttgtaggctccgaacaaattctatagtaatcacccaatggatgattaactcacgtattgcgctatgtctaacgcctaggtatcgcgacttaccgttatacactggctataagccttagccaaagtagcttgactatcacagtggatagaaatgagtgaaaccgatttcagccacaagaatctcggagactaagtttcttaaccattctgcctctctccccgcagctgctaatgatacaaattccgattccatattcgaatttgtaatacaagtttgtttctttgatgcccatgaaatggcacctcctttaagtaagaacacccaaccacttgtagaagaatgatcttcctcgttgttgatccaatgcatccgactatccttctaagacagaagaaaaatgatatggatcaaattaccctcgaccgctttctcaaataagaggtcagttgtagtacttagggatcaaattcacaaagctctttttcacacaaaaagttaaataatcgagattaagctaaatcaataagtgtcaattttgctaattgattttacaaattatattatttaagttggcgatgtaaaataatacctgtttcggttaaaaactgatgaaaatattatttttattcacatatgtgaaattatatctatttctattaaaaaagcctatttggttgccttttttagaaacaaaaacgtaattaaaaataaactttatctaatacataaattagaaaatagattacataatttatccataatgcaaatccataaaacaaaaataaacgaaagttgataagaaatattgctatactaatgttgatcatgatcattagaagtgtttccaccgtttgaattaacattagcatcatcacttattgctcgagaaaaaaaacatattagtgtatgaaacttagaatttgctacagaaagcgagaaaatggcgtagtatcgaactcaatctcattaaaaaggttttttacgaaattagtatataaaaatcatatacctgattagcattagaaggatttagggtgtttgcaaaaattggattaggtatgttcgcaaaagctatagcaaaacttgtagcccatgctcttgcctaaatatatattaatgtatttgttttatatatcaaagtataatgatgcaatttaacttagaaactatctttatattaatacatgatcagcagttgaagtaccaattatttgttggacaaagatagtcagtcctctaacttgatctgataattgcttcacttgtgtattcagcccaacgaccaattcagaattttctatctctgctctagatgtagttaagcgtttcactaactgtgaaggtgtggatccccgaccaacacaacaaactcgtctaagacgctctggaccaaacacttgcgaaaattcatcatccaagctatctgcaacattgtttgtgctgtggggattttgacttatcaaaactaacagcgcatgttttagcctcttcacatacaaaatttccatcggtttcatgcgagtctcaatgaaaaactccgctcgacatggttttttccagtcttgattttcttcataagagatacatgcatcactagtatacgttaatatcaatattgtaaacaagttttattatacaactaagttacttacaatctcatctcttttccttgaaaagctctttcttcaacacacgtgaggcataatatatatatatatatatatatatatatatatatatatatatatattggtttcttctattctgctcttgcatattttgaaagagctcacatttaaaagaacttacgttcatttgatatgaagagatagaattatacataaatattcaatgaataatctacaccttccacttttcaacaaacctcatgtgagcaaaatgatcccattgatcttcaggaacaccagtgggtcgattctccaacgtttcacttagattacttcgtttgtatgctttccaaagacgtagttttacatccttgcatctgctacctagagcgcccatcacatatccttttctcagtgccggatcatcaaacaagaatttaggcttaaatgaaatcacatacagctatcatcaaaccagaatactgtcttagaacatccctcgatttataaatatctttagaaacaaatagatggtaaaagttacctcaatcacatcccatgcctttttttagtgtgaggattaaccagcctccaattgctgtagttgatgggtagcaaattcagatcatgacttaattgacctatccatgatccaagtaaaccacaagaatctccaattggatgaccgctatcttcgttgaaatgcacaatcactttgtcgtttagaaattccagacatctttacatgtcaccattttgccttctatgcgtccatcattatcttgttgataaacacaaacaccagaaggaattcgattagtataatagtaaattaaattaatatataggattactttgaggactaaaaacaaaagaagagctatgcctataaataaacactaccatcaaatgtttagatttcaagtatgtaaaacgataagtgatatatccctattttcactgattttatatatgatttagggttagaattttgagtctttatgttgtttctcgagtctttttagtgtcttttcaggtattctatgcagtgggacagcaatggagataagaaaacattttggagcaaaagctaaggaaaaggaagctaaggacgattttggactcaggaatcaagaggagtgtcgatcgacacactcttggtgtcgatcgacaccagttttgggccaacaaaagtccaagacgctttcaagtttacataagaggaaatttaccccagaagacttctctatttgcattattagtccctggacgtttttagggtttcatatactttgttttagacctaagtttcatcgatcaagtttttatcaacctttttgcaaaccctgttactgagagatataagctattcatcccttgttttccagagattcatacagttcttaatacattgaagagatcccttcttttcccttctctatttactgtgtttatgctttcatactcaaagatgttgtttgcttcaatcaatatgtctgagtagtctgcttgttaggaatagggtttctcattagggattcatatggtttagtagattgccccctttgctaggttatctgtaaaattattcatctttaactgtgtttaatgctagatctagaatagctaactagatcttgaatccagacaatagatatgcccgccataggtatctgtagttggatatattatttgatgagcctggtttgtaggtgtgtaataagaatcggcctatctaccaaggtgaacaatcgaactcgttaagaatgcatatttaggttaataatttctcggcttctccggttattcttagctatagatatatgaagtttcgcggaacgccaccggtcattccataattagagtttgagtttaagaatggtttgataacaacctagctttcattagatctactaaccaatagtttatttaatcgtttacaacacaatcaacctgctgttttcttactttgttttcttaaaatttcaatcatcacctgctagcttaatctcgacattcaattcattgtttgacaaaagaactttgtggaaatcgatccttaaatactgcaattgatctcttatttgagagagtagttctagggaaatttgaaccatatcaacaatcatgttcaagctactacaacaattttaatgaaaataattattacctatgacttatactttccatttgaagcttttacattctggagcaagtggaggaggcgttgtgatcttccaaagatggtgattcatcaaggtgcctctgaatccatggatccatgattgatcctagactagaaaaaaaaacgttagtactacaaaattgaaaaccgatttgcagaatacgtaatattaacagattcataaaacaaactttaaatttgaaaaccagtttaagtgaccttgagataatcaatcctgattctctaaaattgctctctaccagttttccctagagaccctaaatccaataatttgttgtagttaatttatacaaaagaaattaattcccgctgaggataaaataactagccggatgtgaaattgtttagtattttcacgaaatctaattatatttttaagagattttacaatttaaattagagaaaaaaacgcagacgactaaaagatattcacacacaaaaaagaaagaaagaagaaaaattagctcacaaaataacaacaatataattaatacccaaaaaagaaaaaaaactaactgagtccatgttgaatagatctcctatagatgtaaggaaatactcggcttctacatcttaattaagcattacttcctatttctaaatagataggaagattcaagagcttctctcccagacgtgatttttgagacagccttttcatcaattttttctggcaccggtagagcgttagctcgtcggtgccaggagctagcttcttctcaccggtttcctcccataagctctctcatcggtttctctgttttttgtttcgtgttgtttcgtctcttttccctcctattagatccataaagcttcattaccgcacaaccttcgaaactactcccatctggtattagctcttctcttaccttgttcgcgattctcgtggatccctctcctcggctttccttaaagtcaagatcagcaactctttggtcctcaatggatgagagctcggcctcgacgtggaaactgtggaggcttcaaatcacaaaagaatcttcttctgcagaccgagattcatcactcgcacctctcgatgtggtcgttttagtcttagaagccctcaattcggtcaccagaatgttgcattcagttgtgccaccgccgcttttggtgaggaagagaagaacctggctaaacctaatgggtcttcggtttgggccaagcccaagcctcctttgccctccctcctgtcctttacccaaagctttgaagcccacaaagacttctgctgacttatgcccacgtcttctaaggccctggtcttgttttaattctattctgaacagcccaaattttctgaaactgtcatcgtttagggattgttatggacgccttcctgtaatggtgatgatggatttagtttggattagttgctatctttcacaaaacctggttgctagttcttatcgtgtggtccgtttgcgtgattgtccgagtctgatctcaagtagtttggaagtagtttctctttggaagtgtcctagattgttgttgcccgtgtgaagtatcgctaatatcctgtcaggttccctccctttagcaccctttgtctctgatatggctggttatggacgccacgctaatttacccaaccatagtcatttgcttggtttcctttggaccctttccgagactagtttacccaaccatagtcatttgctttttagagttaagagtaccggcattatgaccctatttctacggagtaggtgttaccgaagcctctacaactctctatctacccatacaccaattatcaaggtcagtcatgtattaatcttttgcttggataatttgcaaccttctgtttgtttggaaaagtacggcattatgaccatgtcttttagagttggttaccgtttccttttcaacctcaccaacccaacatcctcctccgtggagcacatgatcaaaagctcggatgcattgtttgcaaggatttcgccaagcccgacttcatggtcgaatctttcaatccttgtaagctttttttaaaagtacacatctctttgaaaaactcatgaagcccctatctttaatttcattgtattatcttatgtctttgtgtatgaacctccttcttttgaggattgaatgaatgaagatcttgtttgacaaaaaaaaagagatagatttgttctttgttctcgcttccctcttaacatttgtttccaaaaatatgtaagataaatcatccataattctctgttttttaaaacaaccaataattatatgtgttatatcacgtttatgcgatccataatttttaatatattagagatgatcatgatagtgattctttagctaaaactcgtcatcagaggaagccgactcgtcgtcattaggagttgctggcgtagctggagctagtggttcactagtgatatcatttgtgtcaaggtcatgcaacttgagactagaagcaaggttgagactcgtatcgcttaaatccccgtcagaatggtgttggcgcggattttttccttggttgaatgctagaaaatatgtggaggagcgtacttcttcacggcgcgcgtcagtttagtgatgatcaaaccctgacatgctagtttcctgtcaaggcgtgcttggttgttctccagcctactgatagaagagtagaaccacttgtccgtctcggtgcgcagtggagcatttacaggttggtgaaatggtggatagatagaagggttctcactggagagctacttggtgtcaatttgcattgactttcgcttctttgtgtaatatttgcttagcggtctgttgctagtagctacatagaaggaactttctgaaggcggaaatggtgtactgttcgacttaatcgatggaagatgctggctggataacaaagatatttgctcattttcataagatgctgtgaagcggtaagcaagttgtagagggttatcaacccatcctcccaagtagtgcttacgcccaaggaaagcaagatcaatctttcagatcaatcccacaagcctccaatattacagatcagctccaccaatgccaaaaacagctcacgtgtccctttttttgtaagcataatgcttatattctaccaactcacaagtgagaagtgctccaaggtttaccttctacgggtcgttgatgaatggtgccatcatgatatagaactcaccttctttgattgtgatagtatctgcgccaaaaaacatagtgttggctaacattcgaagggcataacgcaaagcatgatgcttgatttgtaccgctttagaaccaccttcgtaggtatcatatgcaaattttgtccatttagagcaagtacttttgcagtgtgtgaaccgaatcttgtccttattactgaaaccaaaggcttgcaaagatctcgaatcgtgatagagtactctgtgtcaccaatgcgaaaatataatatcgcggttttcggtgacttgacatcctcaaaagcaactctgactgttccaagaaactccttagtaagcttctcataagctccgtacttcaacaaaatgaactttcgtaatccccaagagccaggccacatcatcgcaaattcccaacgcgtcaagagtgaaatcatcggaatagagagtggatacgactaaagctccttgacacgcagctctatagttgacgcctttaaccatctttgtgccccattctttctttggcagttcttgttgtggaggtgattcaggttgtgctttcgcctttgcttttactttggatctggtagccataatcgttttctttggttttgctggttctcttttgcttccctttcttgttgttggtactgttgttcttgtcatgtttactaagtggaaagtctacaacatccaaggcaattgaaatatttatcaaagggaaaagaaatgtgagcatcaagaacatcacctaaattctgtaaattcaaagaataatcaaggagatatatgtgaatcaaactaattatatgttaaattatgccactatttcagctcatatctcaaattccatgtcaaatataaacagcctatatacaaatacctcaaacttaaccataagatttaggtttctagaacttacttcaaattaagttagacgagagcaacaaaatcacacctacgtttgtcttcttgagttctaaaaacgtgaagagattattttttttctttgtagggagaaacgtgaaaccacggtgaagagatgaagaatgtaaaggcaattatcgatttggttaataatatctctttgccttttttgattaaaaatttaaagtaatcaatttagatatgtgagaaaaccggttggaacttgccttaaccaagaaaagctacaaaatattttttttctgacaaaaaaaagaaaaagaaaatcgattttgtggttttcttggttaagccaggttcaaaccgatttacatgcatgtgttggatgtgtgaaaaaatcaatgtgccgttacatgcgtctgatggaaaagatgcgaatgttatattggaagaaatagggtaaacgtccccacgaagtttcatatagtaccacaactacatagatttcagacctcgttcttagtccacacaaaatgaaaattaaagttttatatcctctaaatcgaaagttcgagacttgagtctccataaattcaaattttacggtttagtattggtttaggttataaacttgataccaaaccaaaaaccaattatagtaaaccgaattgcatccgattcgacttattcacaacccgaaataaaaaccaattagagaaatccccaaattgaaaatctaagaaccctaattttgattccctctcttaacatcttacgtgtgagctctagtatgagcaaaacatactacataaataacaaatgaaacataaacggatttgaggtagaatttagattgaaattgtaaacaatttagaatattaaattaatcaagaaaacaaaattgaatgaagaaggaaacaaacacattatttcttcgataaatctttggctttcttcttaattcgttgagcatgatgttgttacacagagtatatgccgtatattcttggaggtctcactatatccgacattgtcaagtttattcccagtaccatcctaagaacttccaaaacccacaatgaatcaatgctgattgagagtctttttaaatctcttggacatttggccagccacagtcatttgcacgatgctttcaaaacgttttctcttcttcatgttcaatcgaggaatatcatactctttcagaccattaccatctcttgcattcttatcagctaataacaactcaaagatgttgaagagagggaatcgaaattagtgttcttagatttctcagtttgggattcttctaattggtatttattttgggttgtaaataaatcgaatcgggttgcaattcggtttactataatgggtttttggtttggcatagggttaatgatgtaaaccaatattaaaccacgaaatttgaatttatggagacataagtatcgaactttcgatttagggagatacaaaactttaagtttattttgtgtggactggaaacgaggtccgaaatctatataattgtggtactatatgaaacttcgtggggggacaaaggtcgttcacccgaagaaatacaaaaaagttttgtccaacacacgtgagcgatactgaatgcgtaaatggtgatttagtctagtacagtggaccagtatcggcccaaatgattttaactttgttcggaatgtggttgtacctgcaaatatcacccaaaaatacctacaactcgtttatgaagtgacgagtgtatacaaaaacaatttaaaaagaaaataaacataaaataatcttaaaatgttgaagatcataatatttctgaataattcttattaggacaaagaaacaaaagcttgctaagcatgattggcgaaatatgaaagtcttactcaaaacatattgtctagatttacacaacttctcctccctcacacaaaaatgtcacctccctggttatataaacaagcaacaaaattagttatgtggtttctgtttagtagaataatcatatctaataatctcgctcccttatttaacaagcttataagatgcaaataagtcctaaaaataagacaaccatcaaactaatgccaacatatcaacaaatattgaattaattactcagatattatagaaaagtatgtttattactataatacactacaagaaaacaggtgataaacgacttacaccgcagtcgcatagtaaaaaatgataatacgactagtcggcgactaaagacgttagtcattattacatagtcgctgagtgagatagtcgtggtcgttgatcgacgactatattacgacaataacacaatcagtaaacaattgtcgttgtatagtcgtataatattggcgactatttaacgaccatagcacgattaattatcctgtacaaagcgtgtgaaacacgtggtcgtataatagtcgtataagtgtttccgacgagttgacgactatttgaagactaattctatcaatgtaaggaaataattctcgttgtcatataatagtcgtataatgttttacgactactatacgtctcatggacgattatattgtgactaggttggttagtcggataataatcggtaattaatatgactattatacgactattttacgtctaatttgctacctaaatacgactactgagagactacttgttttgtccgaataagaatttggtcatcgattgttgggtttcttgtttgttgtttaaagttatgattttttctctttttttatttgaaatgctaaaaaagatgaaaagacttgtatatatagaaaatcaagttcaaatacaaatacaattatcttgtttattacacaaacaacttattcaaataaacataagttcaagtagagtttgggcaaagataatctaaggatcattaggtggaggacttggtagatgttctgtggttgtggtagagtgactggccatgaagtccaagaactgcggatcggtttggcggagatacttctcgactaaagacaattgctcgagcttgtccttttgctcagctgtaactcgagatgactcagcttctcgggcagcaatctcagcatctctcttctcattatatgcaacctgctcttctattttcctttgagcttcatgcagccgttcttctagggcttgaaaggatgatgaggaaccggagtgatggcggttggcgctgcctagagtgtcttttagacatccaagtccataaggattgcctcttgaatccttttctgtggactgcaagaaatagagaagaagctcattagtgatagaatattaattggactctaagactcataattatactaaaacatcttacctcgagaaagatggctgtataatcatctagtgtgagctccggaggtcgtgaagagccatcagagacagcagaagcagccgcctctagtgctgacaacctatctctcacattctgctgataagcttgagcaatcttctccgacttctgatcaacaaatgagccatccgacttagtgtgtgtttggatgaacacctaaccaagatggaccggtcttcccaacttctcttcctacaaacacaaatcaatatcaacagtagtcaacagacataagaactcaacatactcacaagaaaacagactatattggattgaaaacagaaaacagaaaactctaacttatgagaatctgcagaaacacttaccaattcatcttggatttcttgaaaagattttggcccagagtagtggacgtgacgaccgataccgttacggtcagagagacgggctttggaataggtccgactccttttctgtgctgcttctgtgtcccagtaagcacacattgttccccacagcgtttctccaatccatggaggctgctctcgagttgtccttgcggtgctaaccatgtccttcaagcgcctcttgacaatctcattgaagtaatactggactgtccctgttattaagggatcccactggtgagttttctacaaaaaaaaggaagaagttagtaaaactacagaaacttaacttgaacaagagcacatatagaggaagcttaccgcaaactctaaaaataatctttctcttttatcaactggcacacatgaccagttatagaagggagcatcgaatttttgtaaaaaaattctagtgatcttcctaaccaagcgagatcctctgtctcgagtaaacctccaaacacatgcaacaaagaaataagtaaacatgttacaaaagtgaacaaagttatgttcccaaaagaaatacaagtcacacacgactataaactatgttccacaatagtactgtctcaacaataaagcatcattcacaatcaaagcatcatcatttgtgtaatatagaacaacataacacgagtttagaactgaactaaactaatgaccaagaactaatgtaatcacaacacaacactcaactatgtttgaccgattcacaacagagcatcaaacaacaataaaacaggcattattacataaactaatgagtctagaactaaacttgactaaatgcctaacccgaaaacactagcaacacaagagccaacaatgtttcacaacacaacagccaacaaggttcacattttcggtttgattcacaacagagcatgcagaacaagaaaacagggaatttaaagtgaacttaccattcggtttttggccggggaatgggagacaacacacaacaccacgcttctctgccaggcacagagagaatgtcattcagagcaaccacaaagtcttcttggagctccggcaacactgcaagaatgccctcttggaagttgttgccttgcgatgagggatgactgtgagatgcagtttctggatccggcgaaagaggagggtcttgctgagcagtctcttgtggtggcaacggatctatacactgtggttgattggtggagtgttgctgcggtggtgggtagttacggtagtgggggcagaggatgaggcgccggcgccgactccttgaggcggaatcgatgcagaaacttgaaccgccgccgccgccggggtgaaatcgtactgctgcggtagcgaagagggtcttccagcaggcgttgaacctccggctctttgagtcacgtttggtgtggtcttcctctttcgagatcctccacgaccggcgttaggcatcctcttggagatgagagaatcgagatggatcgaagaggcaagggagagtttggcgaagaagagagaatcgaagatgagagaatcgagatgaatcgagatgtattagggtttgttggtgaaagacggatcgatttagggttaagaagaagaagaagaagaagaagaagaagaagagaatcgatttagggttaagaagaagaagaagaagaagaagatgaagaagaagaagagaatcgatttagggttaaaaagaagaagaagaagaagaagatcgaagaagatcgaggaagaagaagaagttcgaagaagaagaataatttttggctaagtgtttggatcgaaggggaaatgaatcgaattagggttttcaacactggagtagtcgtatatttgtcgctcatttgtcactaaatcaattgggtttgggcctcgacgattaaaagcccaataacttacaccgtagtcgccccatagtcgccgaatcgtcacaagtgttatgggcttagtaattttgaagcccaacaacatatacaagtgtcgctgtatagtcgtatatttgtcaccacttaagttgggtttgggctttgttatttcgaagcccaacagcttacaagatagtcgctgtatagtcgtatatttgtcaccacctgagttgggtttgggctttgttattcgaagcccaacatcttacatggtagtcgcataatagtcgtaacttcgtcaccttataccttttaaaattatttaataattttttaataattattcaaatacttattcaaatacttattcaaatacatcgtatattacaaaatttattcaaatacttattcaaataattatacatatatttcacacaattattattcatcttcgtcttctatttcatcttcatccaaggacgataaattatatcggaattcatcttctggttcagcatctccaatatcgtaatcgaggatgattggggttacgcctgctaccggatagtctattacaagatcttcaattgtagtctgcaaaacagcttcatcatcctcggtttgcaacagtctcggatcagtattttcatattgtccagaaatgtttccccttggattgacctttaaaacactgagccaaatgttctttggtttctttgtatatggatatggaatataacaaacttgatctgcttgagatgctgttcaaacatgttatacatatatcaacaaaatcatatgcaacattatttattaatgaattagaaatttcaagtatacttaattacgtaccaagaataaatggctcgtatttattgtatttcctcgtaggtagaacatctacaacgccaccatggtttcggcgagttcctctcccgagctttgggtcataccacttacacttaaaaagtgtgatcctcaaattgacgatgccctcatactcaagttctatgacatcagttaaggtaccgtagaaatctgcttcatcagatgaatcagcgtaattttcacctttaacacataccccatagttacatgtctttcgtccagcgccgtgggtttgcgtatgaaataaatatcctcttgtgaaatacattggccaagttttaaccttgttcaaaggtccttgcacaatctcttgaacccaagtaggaaatggagaattagtgttccaatatgttacctacataatatagataaacaatatcaatatgatcttaaattaaatcactagctacaagaaaacagacaaatagttatatgcatgaaccaaaattaatgtagacttacatattctttaacccatagatgatattcttcagctcttctgacgtagagttctttttcggccaaggatggatatttcgcagaaagataatcctcgaacatactgtctcaataaacgaagacaaataaatcaaagtgatcttagctatgaataaatcaaagtgattaaaaatacctctcaaatggtttaaaatagtcacaatttcttaaaacatatgcatgtgcattttggtaatctttctctgaaagctgttctacatgcagcaccacttggacggccgacctgcataaatatgttaggtactccagggacatgatatacatgaacttcaccttcatcgaatcttgttaacctgccacatataattgaattaagatcgaagtagtatagcaaattgttaaataaataaaggtatttaccttgattttgtttgtatatgatcgacaaagtagtgctctgaaaaataagcaatctcgtcattgatatatgactcaacaattgagcctgcagcatatcttttgttctttgcttttcctttcaactttttgaaaaacctctcaaatggatacatccacctatattggacagggccacccaattcagcttcgtatgggagatggataggtaaatgttccataacatcgaaaaatgatggtggaaagatcttttccaagttacagatgattaaaactatgttctgtttgagaatttgaatgcgacttgtctgtaaagttctcgaacataggtcgcggaaaaatgctctaattcctaaaatatatgtgcaagttaaataattagataaaaaaatttctgcttaaaaaatagttagtattgtacctgataatgcaaggtggacattccggtcaagaagttcggcaaagataaatggaagtagtcgctccataaaaacatgacaatcatgactcttcatgcctgaaaacttaccattctccaaatctacacaactagccaaatctgaagaataaccatcaggaaatctaacatcatgtttcacacattgaaataaactctgtttggcttcttctgtcaatgtatacgctggaaaaggagctttacccgtactatcaatatgtaagcctgaccgagaacaatatttctcaatatccaatcttgacatgatattgtcttttgatttacccttaacacccaagagagtgttcatgatgttgtcaagaaaattcttctctgtatgcataacatcaatattatgtcgaagattgaggtccttccagtaagacaactcccacaatatgctttctttgtgccaattatgttccttcccatagcctcgcatcttcttttcatgaccgttcccaccaacatccttcgttttgggtgaatttacactagccaaccgctcgtaataaacttgctcccctgtcaaagattcgggtggatactcgctagaagcgtctcttcctttgagaaagtcttttttgttcctacgagatggatgaccatgaggaagaaatctacggtgataatcaaaccaacatgtcttccgtccattgggtagataaaaagactttgtactttccatgcaaactggacaagacaatttaccatgagtagtccatcctgataacatgctatacgccggaaagtcgctaatcgtccagagtggtactgcttttagattaaaattttgactcaatgaaacatcgtacgcatcgactccagtacaccacaactcttttagctcctcaataagaggttggaggaagacatcaagactagctcgaggatgatttggtccagaattcagaatggtaagaaataagtactctgtattcatgcacataccagggggtaaattatatggagttaggatcacaggccacaacgaatgattacgagacatgccaaatgcattgaacccatcagtacacaacccgagataaacgttacggggttcttcagcaaaccggggatgtaactcttggaaatatctccactctgccgcatctgaaggatgattcatttctccctcctttgattggtgctcagcatgccatcgcatagccgcaactgtcttatggctctgatacattctcttcaaccgatctgcaataggtagataccacatacgactatatggtactttggttcttcgacggtcgtccttaggcttccatctttgtgcgccacaaaatcgacattgatcttctttttcgtcttctttctaaaataacatacaattgtttttgcaaacatcaatcgtatgatattgaagtcctaaattgcgcatcaacttctcggtctggtaatgtgaagtggtagcctggttttcttctggtaaaaaatctgtaaacatttcgcaaacggagtccaccaacttttcactcatattatactccgctttgttgtgcatgagtcgagatgctaatgataactgcgactgcccttcacgacaaccattgtacaatggattatttgcaccttctaacaagtcgtagaacttatttgaatggttacggaccggctcttgcacattctgataactaccatcatgatgatagttatcatcatgacccacgttatcatcataccccacgttaaaattaaatgcatcgttcaccatatccacatatggatcttctacaacattacccacttcttcatgattctcactaaaatacgtcctatccgtgtaactagttccgatatccatattcaattcttctccatgcttataccaaacataataatcaggcataaatccttgactaaacaaatgactactaactcttctacccgagatgatgtgtttttcattcttgcatacactacaaggacaatgaaatttacctcgacaactctgtactataggctgactattagcgaatgtcatgaattcctcaactcctgcgacgtattcggctgacaaattccccgtcacttcatcgaatctcttgtacatccaatctcgatagaaaccgccactaccgcaataattgtagtttcccgccattatagaataaactaaatttctattttttccgtttttttttccttttgattgttgttttgatttgttggtgaaagaagattgtcgtgaattttgattatatagacgaatttttatgactaatttacgactacaacaaacaaattaggtgtacctacttggcaatgcggaaaacgttttccaacaacttaatgcgactactctgcgactcagttgcgactattttacgattacagaaatgtgtcgtattttagtcgccgatttggcgactaactgtcgcagtcggaaattgtagtcgtccatttgcgactatgtaacgacaaacgtctcccttcaataatataatcgttaaatagtcgttactatacgagtatttgccgactaacatatttagtcgtaaaataacgactatttgactactaatgttcaggttgtcgtatatgtgtcgtaaaactgtcgtgacgtagtcgccaaaaacgacgactacatctgttgttgctttctgtagtcgttgtttgtctgttttcttgtagtgatattatacatgttttaaaaattactcatatattttgagtatttgtgtaattacaattaacactcttgattattttatttttaataaaaaataataaataaaaatttgactgtccatgtcattaactcacgtcaccaatctcacactcctcaaaatcattttatttccctcctctttttttttgtctcaaaatccaagaaaagcttttagatctaataattgcaacttgggtacaacatggacataggtcttcaaattatatgattgggctggatcttcctagacctcagagccacaacgcttgctatagggtcccaaatcaaaagcttcgtcagatctacacgcaacctcgttcacgaaaaacatcaaaaataaaaatccaaatcaaagaggtctatggaattc

SEQ ID NO: 1468 - DNA, 151828 bp, Arabidopsis thaliana
gaattctcgaggatggggtaattgagtagtttcgtttcctcagtttacaggtgactgacatgctcaataaattatccctaaacaacaagttcattaaccaaatctaagtgccaccgcaacagagaccctcaagttaacctagtcccagactcaatcaccattgacgagagctaacctaacaggcattacgaatcaacaagttaaagccaaaacgctccttgcaaccaataccttggtacagggccacgaatctctagaattaatggttcagacatttcatcgaacaccttttgggcgcagaaatatctgggctcaaattccagttgatcagaaagcaataggcattaagaacaactaatccagaagggatctatcaatcaatacttaaccacctagcatactgagaattctacactactctaacccatcctcagaaacctattcactactcagacatcattgtagagaacataaacgttgaacaggatgaaaacacgataacaacagtgtaatagcaaaacgataacaggatgaacaacagtaaacgaaatcaagaacaaatactgaatgctaaatactgaatagataaagagaaatccggattacaaaaggtctagaacacagtgtctgcggaataaaactagataaaaaaaacttgttctcgaaaatgtagggtacatgctacttatagcaaaatattccgaaaccctaatacttaaaacgacgcagtattgggacggattaagaactgtactcgacctaggtggtcgagtgggaggtcgagtgaatagctggagtcttcttttctttcttatgcttgaatgtctggttgagtgcggaatgaagaagactctgaagcttgccatcgagtatgtagtcgagtggtggtgatggtgatactcgacttcccggtagagaggtgtgatcgcggtggtgatctggtgatggagatgaagacactcgaccttggggtcaagtgaggtgatcgagtggtggtcaggtgatggagatgatgacactcgacctcagggtcgagtgatatgatgaaatcgagaagtcctctactcgaccagggggtcgagtggtctcttgaggtcttgaagcttctactcgacctcggggtcgagtggtttgacatgatcaggtccgcttcttccaattagctcgtcaacagctccaaatcacctcaaatcaacacaaatatgcaacatgcatgcaaacctatcctaaacatgcaaagtgatgacaaatgatgagaaatggtataaaacagtaatgatatggtgctaaaatgatgacaaagggatgctcaaaacatgcaaaatacatacttatcagctatttcaagaaatcagatagtagaggtgaatgctaagctggattcagttcataacttgctcacagggaagaagcatgtctactttgcagctgaggaagagactattgagcctgagcctaagttagaggaaggagtcttctacataaatggtcagggatacaggaagtttgggcaaacacagggcaacttcagtggcaacaggtttacagggaaccagggttcctccaactacactccaaatcctgctttccagaagacctttcctcaaagaagctttcacaggacctatggtaattcagcttaccaagcccccctcccctccaccctcagcagagacaagaatggaatcgatgcttgagcaaattctagagagccaaacaaagcttgttgtggagtttaatggcaagtttgatgctgtctacacagatcttaatgggaagatcgacaatctgagctctcacttgaagaagctagatgtacaggtagctcgaactgcacaatctatcaagagacaatagggttttcttcctggtaatcctgatgctaacccaaggaagagctgcaatgccatcatgattagagaaggagatgatgtgtgggaggaattggactctaaagacgagttggagctcgcagttgcagagagggtgtcgatcgacaccctcctgtgtcgatcgacaccatatgggacgctcttatcagagacgactcaatacgacggtgtcgatcgatacccctcttgtgtcgatcgacattggatccggactgcaccctgtaaggtgcaaatacctatgtagcccgagcctgtctacactcctcctgtcgcgtatccgaagaggcgtcgttctaagcaggagcttcatgctgccaagtgcaaagccataatggagaagatcttccatactcttcctaaggatgcttctgagacatctgcttcctcactcaacaggtatgtcaagcgacttgttgacaatggaattagcttagatgaagctaagctgcttaccagggacatcagtgcaatcatgctgcctaaggccaagaaggagaaggcatagagagtagacatagccgagtacatccgcaccattactcctggtcagaccactgagtagcttgtagatccatgtagctttgttcttaattgctctatctccagaagcaggtttagccgctttttgtgtgatatgggatccatcatcaacctcatgcctaagtctgtttgctgagagactaggcatgactcactacagacctactcgcatcactcttctcttcgcggatcgttccaagcgaatccctgaaggaatccttgaagatgttcatgttaaggttggtaactctgttatccctgctgatttcgtggtcctggactatgagaaggaacccaaggatcctcttatccttggaagagcattcctagctacaactggtgctaggtttgatgtgaagaaagagagaatctctctcaaggtttgtgatttggagatggagtttggcatggatggttcagagcttactaagcctatcagttgcattgcttcaagcatagatacacctcctcagactgatcatcccaccacagagccacacaaaatgctccaacccgctcagctcgccaatgagagttgcagagcaacggtgtcgatcgatactactaccccctgtcgatcgataccctcgggtttcacagacagaggattctgcacactctcttcaaccaacaccacttaaggacctatgtgataaattctcttctctctcttctcctgctttacctttgattaattctttagataattcgaagattgcttcacaagataacaagcctagattcctcgaaagcttgtttctcctgttgttcttgcaggtgacgagatgagtgtcgatcgacacatccctgattgtcgatcgaaacctgcagctgccccagccagatccgtttacacaccgccttggaaggcgaggaggcagcatcaatcctccaccactccacccacatcttgaactccaccaagtcaagctattgactcaaaacgagcgcttagtgggaggcaacccactggtttgatttttcttttcactttcttttattttcttttatttttgtttcattttcccctctttctctggatttgaatgccactggggacaatgtcgtttaagtctggggggggggggttcatactaatatggcttttatttttgtttcttatcatttttcattttgcagttcatttggttatttcttttatttccttttctaaatttttttaaaaaaaacgttttgtttagtttagttaggaatcatgatctatatttgtcttgttcgagtcaatctgactattggaaaatctagatggcaaaccaacagacttaaggatatcctagtttccaactcagccactaaggctggagctaatctcactgctcttccttttacctcttcaagtagttagtattcataaatcttgactccttgttgatacctgatattgagaccaatgtgataaaaagaatatgttcctctccccttataaaaagaaaaatataatgagagatggagatgactttcaaatagtgtatatgggtaggaatgtttcctatgacctcattattataccttaattggaatgatcaattataaaggttggaaaaatgtcgagggtgtcgatccagtatgcgagttcccctttgtttactctctaaaaataataagtctgggggagagaaagaacatcgaaaaagaaaaacaaatatataaagaatggtcttgaatgtcagcttgtttgatgagacccagctatgaaagcctggtggatatagttctggaacttaggtatggaatctagaatgttgtgtaagcttgtagagaagtacatgttggttaggatttgattagacttattaggcatatggacttagtttgaatgatcatggcaataggctagagaatgttggcagttcctttgttttcaaaacctcttccaagggttcggcttttgtgttatgcttgagggcaagcaaaagctaagtctgggggagttgatataacccgattttcactgattttatctatgttttaggtataggattttaagcctttatgttatttctcgagtctttttagtgtcttttcaggtattctatgcaatgggataacaatagagataaggagacattttagagcaaaagctaaggacgattttggttcaggaatcagcgaggagtgtcgatcgacacactctttgtgtcgatcgacaccagtttcggcccagcagaagtccacgacgctttcaagtttacagaagaggaaatttgccccagcagacttccctatttgcattattagtctctggacgtttttagggttttatatattgtttttagacctaagtttcttttatcgagtcttttatcaagcttttgcaaaaccctgtgactgagagacaaaagctattcatccattgttcttgagacactcattccagttttaaataccgtgaagaaatcttttctaactcttatctctattgctgtgtttatgctttctatctcaattatgttgtttgtttcattcaatatgtcttagtagtctgcttgttaggaatagggtatctcattagggattcatatggtttagtagattgccccctttgctagattatctgtagaattcttcatctttaattatgtttaatgctagatctagagtaattaactagatcttgaatcgagacaattgatatgcccgccataggtatctgtagattgatttattatttgatgagtctggtttataggtgtgtaataagaatcggcctatctactaagatgaacaattgaactcgctaagaatgcatatttaggttgatagtttctcggcttctccggttattattagctatagatatagggagtttcgcggtacgcccaccggttattccataataagagtttgagtttaagaatggttcgataacaacctagctttcattagatctactgaccaatagtttccagagaataccctgttcctagctctttattaaatcgttcacaacacaatcatcccgctgtctttttactttgttctcttttattttcactattacccggctagcttaatcttgacattcaactcattgtttgaacaaaagaactccgtgtatttgatcctaaaatactgcaattaatctcttatttgagagagtagttcaaggtaatttgaaccatatcaatgggctttatctccaagtgagaatggaaacaagcgaagcttaaaccatcttcactaactccattgattttagtaaggccacagagtctttcaaactcgtcaagatgatctagcggatcttccattggcaggccatgaaacttgttcccccgaaccattgaaatgagaccgcttttgatctcaaagttgttgttctgtactagaggtggaacaattccatgacgctggttgtggttgtgagggaagtcaccagcaccaatgttggtaggttgctcttgctcatctacaacgtcagccactgtgtcggtttctgtctgttctctcagttggcgagcaatacgatcgatgttatcattgaataggacgttctgattttcttgtgaccttgtatacatgcaacagatagcagccgggctataacagacgaatcagagatgcgtctataaagcgggttgcaaggtacctgaaaaacaaagacagaaagggcacaatgttagtaacttgtgtaacaaaaacgaacttgatcttaatgcttataatgatctcaaatatagcaaacaaacaccaaattggcaacggcgccaaattgatattaagattttactcaattaatcctaaaacactatcctgttgttgtagtattttaggttgtcaatccaatccgatgtgatgtaaacagatgagatatgattagaaagctctaattcaagtcaagcagagagttggttggttctaacagtcctagtatgcaataacagaaatgaaatgaaactaaaagcagaaatggcaattagaggcaggtgaataacaaatcaaatgataacaggctgtcaaatggataaacgattcctaaggatggggtaatcgaatagtgtggcctccttaatctattcaggcggtggacaaaacttcacagaagctatccctagacaacaagttcaacaacagattaattcactcccgtgatagaaatcctcaagaaaagctagacactgacctaattctaattagcgatctctaactaagcaggcaatatcaaatcaactcgttaaagccaataccctctctacaagctaatcccttggggtgaggcaaatatctctgaaattaatagatccaacgtccagtaaacgccttctgagcgctggacgtctggattcatattccacattagccagtgaaaaaagcaataagcgcaactaatctataagggattctagtattctaaactcaatcacctaaaacgaccaagtaaaccacaactactctatcccatcctcaaaaatacggttcactactcagacataatcaaagacaatagcaaagcaacgattgaaaacatgataatagaaatgatgaaagacttaaacaaaaactgaatatcaaatacttgaaagtgaaaatacaaagtcgcaggagaaacactgcggctatgaaagctgcgaaatgtaaaagttggatgaaaaacgggatgccctagggaaaaccctaagaggctacttatataagggaaaataaaacaaataaggaaactagatagatagcgaatcttcacgtcatgacccttgcgatcgagtgagatgcagtgaagacgagattgaatggtccaacgaccctgtgatcgagtgcgatcgagtggtgatcgagtggttgctttggcttctcttctcttcttcgttctcagcttgtctggttgagtgcagaacgagcaaataggcctcctggtgatttgccctggcatggctccgaggctgcgatagagtacttttgctgaaggcgtcattgggcattctgactttctcttctgtttctcctctgtttgaactccaaaagcatccaaagtacctgaaaacaaccaaatatgcaatacacatgcaatcctaatgcaaaatcatcctaagtatgcaaaacacaccaaaacaactcctaatgagatgaaatgtggatgaaacaatgacaaagtggtgaagaatgaatgcctaaatcatgcaaaatattgacatatcagaagaggacgcttcgtttttgtcgtccacctcgggttcattctggacgcgcttccaggggttgttgtccccctcttcgtcgtcatcctcgctgtcggatgggaccacctcgacctgagcatttacggggccaggaacttgaccacgagtacggagatacatccgaagcctagtcgggatcctggctacgcagtcgaagttcctccactcccattggaaggtatcactttccatggccctcaccttcatctccactcgagcgatacgggcctcgagagtctgccttttgaggcctagccgctgcctctcatcgcacaagtggtgataattatcaacaacctaaatatagaaactgacaagcgtaaagagaggaagaagaagaagcatagtagaggaaagaggaatggatttcgaccttgtccatgaagtcgtacgcctctttttttcctttcgaaggaaagtggaaagtggcatggggaaagagaacactggtcggttcgaaaccatcgccggacagaaacagtgggctaccggggtcgagagaacagaccgtggaggcttcttcgttttccattcttgtagtgtttaccaagtaaatttttgaaatcatacttggagaattcggcggcagataagcttttatttatagagggttaggttttgtcttggaaccaaaaaatcaataattatggcgtatctgaatggtttaaaccatttttggaaatggagaaaaggtaattattgcatcaaaggcgtgaagctttttcctgtttctcgaggaacgggaagggaaatggcaaccgtcgcatttaagacgaaaatcccattaaatacaaagtaaaatagttaagcccaagcccaacaagtttaccgaattgactaaacccgaggtggggaatttgcattaaaaccgagctcagatctcgcattctgagagaaaggtctgatcaaccaaagaatctccaaacttagccacatggtcaaaagcatttaagagcggaatttgcaaacccgcactctatttttagcaagaccctctagggattaaagtgaaaaaggtttaaaagcctccttaggcataaatcttgttcaaacaaaaagcctctttaagccaaaaaacatacttatcctaataataaatttcaaattcttaaaagtttgagacaacccccaatttcaaagtggacgcagcgactagggatccataaccatctctagcttaacgtcagtcggctcggtttcattcggttcagtggtagggacttgctcggaaggagcatccggctcatgcccgacatcacattcatcatccgggatgatcaccgtctcattgttcacgaccagaggagcttcctgcaaaacatgatcaggttgagcaatccctatcggtatggtagacacctcggttgcagcaatatcaaccgacccactcgagcttggtgaaaacagctcaagtcaatcaaaacataggaaaaaagtataagtaaaacctataggtaaagagctttaataagggaatttaccagcccaatcaaaactagattcactcaaagggggtgactcggtgaagaactcctcaaagtgttgagggttggaggatgaagcgggaagagcagcaaggcgacttcgtttctcagataaaacagctttcagttcggacctttcctgctcctcagagaaatcctcctcgtgggtttggtccagtaagagcaagttgctttcgtgatccttgatgtccgattccagctccgatcttgtcttctcggtctgaatgaaaaggatagccccctgaatcaactccgttccgcgacatttcacctcctttatggcttttgactctgacttagccaacttggcatctcgaagcttgacaattgctttatactttgcctcaagttcagtgaattggttgttcaaagcataagcggctgattcagattcggaaagcctgccttgggcaaccgagagttccttttgaagtttctcgtgtctgctgtatttatcttgcagtttgcagtttgacttcatgagtttggaagagagatggttgacttgatcctctaacttttgcttagaactagaggggagtggatttcggcttcaagggtagaaaacttgcccttccatgcgttgatgtcctgttctctactaagcagcaacccatcgtaatgctcaaccatgtcgttgagttcgatgtttgcctgactttaagcaagtcagctcatgaaggaatagcaaaattaaaaagcatgaaagaagcaatactaacccgagacgagtgataaacatgaagtaggaagcgttcacggattgcaggacgccatctatcaaaagttggcaagatagcgtcttttcgggttttgaagcaccaaaaaacattaccctctgtttccattgctataaaagaagaggggataaaaatgtgttatttagagtacgaacaatgcaaaagtaaagaaagaagaagaagagggccatttatcaaacctgagagtgatttggtttgaggcacaagaacggtttttgatttcaggggagcatcccgagactcagcatcttcctgtcgaggagttacacctcggttagtcttctcgccactaagttgaggagggggagatgtgaccacagggggaggaggacccatcaatcgaggtggaggagatgacctaggagaacgatcagttcgagcctttgatttctctctccttggagaagagctacctcgggctggtctgtctctctttttgcgaattaagtcagcgactggttcgctactcaatccacctcggggagaggacaaggagagccgcgacgaggagattgtttcttcgaggcgaacggccaccatgacgttcagcggatctggccccctcggcgctgctatcgtcgactagcaaggtcctactatactcttttttgtcgatggtggacatgagaaatgtcttatttgcctcacaggcctcagccctcggtttggaaaacgttttgcgccaggaagcaagggcccgagctgacgttccttgaggtaaaggaggaggcaatggaagttggaggagctgtccaagtggactcattttgagcttgcgattagcctctataaaccaatcaagggtgaatgagttccagagggtttccccttcaaggacgattttgaagaattttatgaattcctcggtcgggagagtttgagcgatgaaagctacgaagtgaaacaacagatttggtcagtaaaaataaaggtgaatagagaaggtatgtgtgacctaatttctaccaggcttcacagaccacttcgatgggagtgcatcggaaagatttctgattgaagtaggggttttcttaatcaaaaaccaaggatgatgttagttttcatccttgttcaggagatgctagatgaggtttctattagcgtttgggtacgccgagaaataccccgttttgttcgatgaacttctcacgctgagaagctcgttcagttcggggaccccgataacatatctggcttccgccgcaatagttatgattcccaagatagttttagagaaggttgggggttagctgctgtagggcaattccaagagcctctaggtaacgaactagggcttcgggaagaggaaaggtcaacccgcagcccttaaaatagatctcataaacgcaataataaccggggagatggtcctccagggactctaaggggtaaggcatcttcgattccaccataatctcaagcggaatccggcagagatccttcagtcgttctagggattgaagggtgcaagtagatatatagtgtggaccggagatattgttcgggcgagtgcatatgtcgctgctagaaccccctcatcgaaggacatggaagagagtggaaaaatcgagcacttgaagaagagaaggtttgcagagaaaaaagagagaaaattttctttctaaaggcaaagcgtaaaagtaagaaagaaataaaatgaatttacctcacgcaagatggtggtgatgatgaaatcgcctcgggagttgtgggggaaatggaagagttttcccgctttaatagtagtactgaagatgcggtcataatggtgatagatgtcatacgggtaaatacggacaatgccggaatcaaaggagtaaaaaaggttttggtgggaaataaaaaagtcatttagcgcaatctttgtccattaagataataaagtcttccgaattggacaagcacttcgagaagacttgggggctaattgttggtgtcggatcccgcaccgaagtttgggacctacgaaagattgccacgtagatgaaaagtaagcccacaaggagtaaggcccataagatacttgggaagaaggcgagttatgggcgaaatgatcacaccgcgaggtgggggcaaagtcgaagtcaaggatgggctgggctttgtcggttaaaaggcgaggcccatgaagatcagagtcaattcaaattcaaacgtttgagcaatgaattcgaagaccgaaacggacgcatttaagagagtataattgtgtgtaataaggaatttaatgtcatttgtgagtataagtattagggcaagaagccatggaagacacacacatttttgttaaaacttaccatacacatttttcataccaactcatagttttttccataatacttagctctttctattcaatttttgtcctcaagaataatccttctcactaaacaaataaatatttgagtatgtgaatccgacattcacatgtactgttgttttgtttcctttattttcagctacttagctttttatttttactcttaatgttcaccagttatgccctctgatacttgccaaagcccataatcaatatgagggaaaactatttggctaaggatcatgatttatccatttagaataactcttttccgttaggatttttaatataaaatacatacaaattattggaatgctacaagtattatatacgagctctgaggagtaatgcgtcttactttttctctatacaaactcataaaagtatttatacataatctcgaacaactataagtacatgctggcgcagaaggaaaagctcaccaaattaagttgcttccttttttggctgaaaattaccagagtaaatttggcacgtcaatagtaaaaatatctcattgatttagttcaatgatgatttggtgtgcaagggtcatattccaccgcgtcgagaagaagaaaaaaagttggaaatgatattcgaggtacttcagaagaaaggtttatgcttcaatattcctatatgatcatgttaaagaagatgaatcctgttacaattttatatgttggaagttgatgagaaactatagtttaagtaattgttctttgtattggagtttccattaaaggcttccgagtcattaaaaagtgatcattatggattgaatccaccttaagattgcatatggtggaatgctaattattactacttatatattcctatttttactgtttttagctatgttttcgatataggtttttgagtttttttgttatttatatagttcttatagagtcttttcacgtattctatggagagggacaataatgtaaatatgaaaacattttggagcaaaacctgaagaaattaagccaaaagacgaattcactttcagatcaagtcgagagtgtcgatcgacaccagtttcggccaggaaaagtccatgacaccagttgaagatatgaaaatttgccccagaagacgattctatttcataattagtccctacacgtttttatgtcaatatatataattttaaaggtcattgtttagaccaaagttcttttctaacaaccaagttttattctaaaaagctatagagtattttcataagctattcatcccttgttttcagagatttcaataacagttaagagatcttttctaactcttttctctattgacttgtttctgctttctcactcatacatgttgtttgtttcatccatcatgtctaagtagtcttcttgttagggttagggtttctcactagggattcatatgatttagtagattgcccttttgctaggttatatgtaggattcttcatctttggttgttcttaatgctagttctagagtagctaactagaacttgattttaggtagtaggcccaccataggtacttgttactggaactactatttgatgaaccaacgtttataggcgtctcgaataagatcggtttatatcctttggtgaaactatcaaattcatttagaatgcatgtttagttataggatttcacgacacatcatcgaaaatcttagatctatgcatagtgagtagcacggcacaccaccggttattcgataattagggtctgagtttaagaacggttcaataataacttagctatttctagatctactaatcatttgtgtactgagaataccttaaacctgacgttttattatcttgatttacaaccaactgacttgctttttgcttactttgttttcttttattttattttactcatctagcttaatcttgacactttagtttattgtgtgaacaaaataactttgtggaatccgacccttaagtactatcgacgatctcttatttgagagagtggtcttgagacaatttgaaccatatcagctacagttcaggatctcgatcatcactattatacgatagcttttgtataattgatggtgagaaagatgcaaagtggacttgatttgaaaaagctcaaatctcttatacaaaatagtataaaccaaattcttatcaaggcaatagctatggtcaatcatttgtctcaccatgagcaatattttcaagaaagggtttacacatatttctctgtttactccaaaaaccctcattcataattactaacgtaagaccttagtccattaacaaaacaagtttactaacctaatgagcataaaaaccaaacaaatttacaaaactacaattttttaatttaaattgagatttcacaacaattaatttcattaggtaattttatatctaataaaattcttgtcacattgctaatttagagaatatggaaatattactttgaaatgagctttaatggtagataaacacgatggaaaagaaaaagagaatagatatggaagattcaatatcgaaactgaagaagaagtgaggagacgagatctaaaatctccaaattatgtttgttgaataggaaagaggagagggagtgtttgttattggttacttttatttgttaatttcttaatttaattgtttgttttaaaaataaaatttcttataaaaagaagaaaggaatttttgaaaatggatttagagcaaaatggctggagatattaaaattcgacaaccaataatagacgttttcatagcacattaaaaaattagcgcaccatacaaaaattgttttaatatttgaaatatcactctaatgtgtatagagcactctaatgtgtatatagcactctaagaccatctagcactttgatcttatcactatatcacttcatcaccaagtgacttcctccccaagtctttctttcttatatatatgttgcttcattgtaaaaactacaagtagagaaagaagtaaacgttggcaagagagactagaagacgaagagagttattataagtgtttctacttctattactttgttccccgtattctcttgtctctctctaccattctttcccaaatcatataataacataataataatttgtttgcgttatattttatcatacgttatttgcacgatcgtcttttcgtatgattgtttaacggaccgatcgtctatttgttcaagcatcttttgaggtaacatttgaattatgttaaattcatttgatatcatttatataatattatatgcatgatatttttggagtatgaggctatgcatcttccttaatcgaatggtaggtcacgcctcttcaaaatgccataaatggcttattaattgaatgattatttatttatttatataattatgtcaaggcttcctaagctcgatgtcgtttctcttgatttatctagcaaaaattacatgacatggacatccgatgtaagaactcatcagagatcaattgggctttttaataccaaagatgcatctgaaatgacatcatataatagcaaagcagctaaagtcatggtattcctacattatcatctccacgatagtttaaaaaatgaatacatcacgagagaagagcatgtggatctatggcaatcacttaaaatcgttttgatcataaaaaaatttaattttgccaaaagctagatattaatagctaaatctctggtttttggattacaaaagtgttggtgattataattccgccatgttcggaatcacctttaagatgatattatgtggtgaaaaagtgagggattatgatatgattgaaaagacgctctccaacttttatcctggaaatgtaatccttcaacaacaataccggaccaaaggatatactcgttattctgagttgatgcaagtcttttggttgctgagcaaaataattagctcttgatgatgattcatttatctcgcccacttggatcaactccacttttagaagtgaatgttgatacatctagtgatgataattggtgaggacacgggccttggctaggttgtggttgtagttgtgggaaaggtcgtggccgttgtcgtggccgagtaaaagaaagaagttctcatcccaatgatttgaacacggaaaaaactaacagaaatcttcaagtgcatgatgttggccatgttaagaaaagacatgttgaaagcatttgccacatatgcgtcataaaaggacactggtacaaaatgtgtcgtataccataacatttagccaatatgtatcaagtctcaaaaaggcaaaataaaggaacgttgaaactaatctcatatgtgatgagccgggacctccctttaaaggccaaaatgatgatactcatcttgataagacagattttctcgattgatcatgacaacgaaaagtcaatgtaatagatttagctatatgtatgatcatgttatgtatgacaagcattatagatgcttttattttatgggataatgttgttattatcatatactacgacatataaatagtctatgtcaaagttttagtgaataaatattttatcccagaaaaatgtcaaaaaataagattgaggatgaagatatttgtctggcgaatagtgtttctacgcgcacaatctttaaagataaaaagtacttcttctctcttgaaataaaagactcagctagaagtgtgagtagtatatatggccatggaaagattataattgattttagcgaagccaattttacaatgccaaggggaactcattttaaactaaatgatgcattatattctcctaagtctcatagaaacttgaaaagtttcaaagatatccaaagtaatggatatcatatatccacacaatataaacgttgcaaagtacacgcaattttgcgatgaaatagcatcaaatttttccgacgcaatgttgcgtcgaattagcatcgaacgtttccttgcaacttcgttgctagttagtgatgaatacgcaagtaagtgtgtcatgcagagcaaggaatttgcgagggatagttcaagaatccagtttaaaccctgtttcacaaatttggttttctgtttgaattttagaggctaagaccaatcggaaaaaaaaaactgaaatcaataggaaatatgaattctgattaaaactgaaattgtttgatgttctaataaagaaatgcatagaaatatttaggttttgattacaacaaaagaaagcaaaataagtagatcatattatgcttgaggagatggttgaactgctgctagttcagattgtgtttggtctcgtggttcctctctttgctcttgtgctccttgtgttgtagatctttgagttctaagtgttgttgctatagctggacaatcttcagcaataaggtcaaagaaataatcatacccttggatccgttttagaagtttgtcgttccgtttcttctccgcttcataggtctcctgatcaacaaaatcatccccagcatgtcgatcaacaaaagcagatgggataattggaatagaacctacaccataataccgtccctttttattctttggagtagcctgaataatcaaacaaaaacagatgcatatcacaaaccacataacatttcaaagaactatacttaaaaattcaccaaacccatcatcaccaaacccatcatcaaacaattgatcttaatagctcaaaaggttcaatgatgcaacttatattcaatgatgcaattgaataagacttaaaaactcaaacaagattgaaaaaagaagggaaaacgtgaacaactagcatgttgcagtttaataggctgagacagttcaaaaataatacctcgaacaggatttgatcctttgatgctgttgataagccaccaggctggccagaatcacctggagaaagctgagactcctgctctaagatcttggctgaaacttccttgcaaatttgctctacaaaaccatcaatgaaatctccattctttctcttgtgagtctgctccatgatctggacaattggagggagttgacctccattcttcttagcctaacatgaaagttaaaatagtaatcatcatcatgaagctgggaaaatgagaagaaaaagtgaaaagcataaattacttacactttctaatgcacgtttagcgtatgtcttttgacctgaggtgtgtctactcggaccatgaccggccacactagtgttgcgagattttgaacacttaccactttattttcagactatggatcaagccaaaaaactttgaggcccttccatacctcaggattcatccacataggcattgctttatcacctgtttccttctacttacttttccacttgcgaacaatatcacacaagcggattcctgccttaattgtaaattgcctcttaaccaattcgttaattgagttgtcccaattatattgttgttgtgtcaaggaaataaaagtaattaataccgcaaacctacttctacaaatcaaaaacagaaatctaatcaattaccgcaaaaatgtgaaaccaagtgtcaacaatcttcttaggtgcctgtgagatgttagcgtgaggttcagtgaagtatcatttgatgtagttagagaccaccttcccaacttcattatcaacctcaaacctacaacagactttagtaacttaatgatgtcattgaattgaaaaatacacattatacaattaaaggagttaccaatgtgttcttggaggacgtttagggtctagttttgtaagtccaaacccatttgatattgagcttgaccttcaggtggagaaggagtgtgagtagaattctgaaatgtctcttgaataggagtgttatgtggtgaaagagatgggatgcgttgcaccggttcagttatctgaggacaggctcttgttgtcgaatgaggagaggactgtgaactccaagcagcagtagacccattagaccgttgtcctctattactcgtaaagtttctataatgactcattccttgcatctacaattataaacaccaagagatatgaaattttagctattaagtttctaaattcaatattcagaaagaggaacaatcgtttaataatgaaccaaggcgttgaagtcaaagtaataaatcaaaaataaaagtgaaaccaaaaagacagctctaagcctttactagtaccatgagtgaatgaaacaagttacacaacagaactaaaaacctaggaatcaaacttacaagagagcgttaaacaaccaaacaaaaacataaagattttcaatttctcaatccataagcacaaaaagaagcctagacataaaacaacaaaaaagaagcatcagacaatcgattgaccatgagtgaatgaaatatctagaaaccttgattctaacacataaagagccacaagactgaactttatataggccttgcaataattctagaaatctaaacaatggcagaacggtcaccggactacaagaaaacaagccatttgcgactccaataaacgtccccagacggtcgcaaacaccttagtaaagactactttgggactactttaattggtcgttaaaaaacggtcgcaaaatctttcggttttaatatagtcgccaatttgtgacaatttcctgacaatacataacagtcataaatacgcgactaatatgtgcctcagttataagttactcttttccgacgtaaatgcaactagttttgtacgtctatgaaaaaagaaccatggtcccaaagtattcgcaaatgagtattggttttgttgcgactaactgtagactctttttgcggtcacattttagtctcgtatttctaaatgtttaacctcgaatttggtcacactgttctaattggtttggtcataatttagtgacaggttttggctaatcataaacctaattaattaccaaatttgaaattttagtaatcaaactccaattacaaagattaaaacccaatataacttagcattatcatcttaaacagacaaaagattatcatcctacaataagtttacaacataacaatatatgaaaatagttcatgagtttcagaaagcattagacaaaggggatgagtttaattcgctgcctgctggtatggtggctgaaggtgtggagcttgctggtatggtgttggtggctgccggtgtggtgcctgttggtatggtgttggtggctgaaggtggtgtagaagaggccagaaaagctactaattctggatctttatctttcatgtacagaacaagcatctcgaagcctgagatccgcttatgagattatcgttggtcctcatcccgtcttgcattctcagtgtcgtgctcagctatcttgcggcgtagttgttcttaaagtttcaaagctattgatgaagaagagcttgcataactttctttcattttccctttgctaagtgtctgcacaagtgatccaagaccaaaatggttgcccttttgatctttttcagtacactaaaacaaagagaaaccaatgcaaagtcaatcaacataacaggctaacaacaaagtattaaaattagataatcctatgatgcgatataaagtgaatgattcacatacaaattaagggtgtcatagaaactatacctggagaaagatctcattcttttcttcaatacagaggtcacgatgagttgactgttcagaggaattcactgaattttctggaccatcatcatctatttctatcagtcgctcttcacatgtcttcttataaatctcaggtactttttcagcttttgcatcaacatatgacccgtcagctcgagtgtgtgttttcataaacacttccccaaatgctacagggcgcccatatagttcctcctacaatgaaattgaaacacattaaaatcatgtaactaatataagaaaatagtgaattgtttggatgactattagaggaatgttaccaattcttggtgaacttgcacaaatgatttctgaccggatacatgtttgtgtggaccaagaccgccacgaccggagtttctacactgtgaagcactttcactcctcaccattgcctgactggtgttccaatgaacccacatctgattccaaagtttatcacgaatcaaaagaggttgtgaaccactcctcttagcttgactaataatgcccttcatccgcttctgggctatcacttcgaaccccgctctaacagcctcagtaagcccatgatcccaatagaacatccgctacatagtacaaataaaagagataagttagcacatatacttagtaaatgagtaacaatatatatttgaaagataaaactgaaaattttaccaggaaactcctgaaatatctctctcggatgttcaaaggagtgaccttccaaatgaagtatggaccatcaaatttcctcctaaatactccagcaatcgccctagatagtttacctttatgcctgttaaacctgtaaaaaaacagagaagagaactaatctctgtaaagacaagaaaaagatgcatctctagcaaaaacagagaagagaactagtctctataaagacaagaaaaagatgcatctctagcaaaaacatagaagataactagtctctataaagacaagaattcatccatctctagcagtaactagtttacctttaatgctaactttttaaactctagaacacatgacaaatcacaagaactaaagtaactagagattgctctaaactctaacagtcgtaaaatgtttgtaagcgctaaatgtttttatgttttgttggggtcggatttcacccaagtacctgagccggtcaaatggataccatcagcacttcgggagctaggcttggtgttgttccggttcgggtgttactcaaggaaacacaccctaagccgggtgcgatgaaacattgtgacccaggggaacaccttagataaacgatacttggctcgggtgttattccagaaaacacacctgagccgagctcaactatatctcggggatcgcttcggttcgagcccaaggtagaatatccacccgaggaggatacttatacaaattcagtgaagggtcaagatatcatttccgaaaaatccggtgaagcatatcaaaaaatctttgggatattatcgaatatggaagttttccgaaactcccaaagaataaggaagatttccatatagaaaatatcccctatcgccgacccggagataactggaaatcttccgaggaatatcgcgagaggcgggttaccaaggtcctatataaagcgcctcgaggaacgaacaaaggggacacgcataaagacgctctcaacttcaggctatcaaaacgctctgactttgaaggcaaaacacctattttttacttttctaaacacttgtacgatcgaatcatcatcttttcagtaataagatcaagagcaccgtccacggtaatcaaataattctgttgttctttgagagtctcacaaagatctgttctttgaagaaaccctaaatacaatttgactatgtgagtttcgactcgcacaattcggcgctagaaggaggggaaagagatttctcttactccaagaacacagaaccgatcgatcgagcaacgatgaccaacaaccagatccccgctaccaccgttgacatggagggaaaccctgttcctccaatccagacaaatgctcccgaagtcgccgctcccgcagtcctagcaggactgagaagcatgatggcacaactccagaagaaggggaacgaccaagagcaagcaaaccgattcttggcccaacagctcaaagcggctacttctcaaggacaggtcaggaccaatcgcttcggcgcacgacactttcctgatcggcgagcagcggcagatctcaatccaacaagacttgtgttcaacacaccaggtaacacaacgaggccatttcggcaaactccttcagggctcggcgaaacccgagcagaaccagtagcctcgggagagaatatgatggattaagggaaagaagccgacccgcgggatccaattccccgagccgaagttgacgaggttgaccagatcgaagtctccgatggcgaagatttggaagaaaacgttagatgggctgaggaatacgctaggaagctggaaataacgccatcaaactctccctagccaaggcggaaaccgagatgaagctcgtacgatcacagatgcacaacgcagtctcctcagccccaaatatcgactgcatcctagtggaatcccacaacacgcctttcactcgcaagatctctaacgcgataatttcagacccaggaaagctaaggatcgagtacttcaacgggtcatccgacctgaaggggcatttgaagtctttcataatctctatagcccgagccaagttacggcttgaggaaagagacaccggtctctgttatatgttcgttaaacatttgaaaggaccagccctagattggttctcaagactcgaaggaaattctgtcaacagttttcaggagctatcgacgctcttcctcaagcaatactcggtgctaatcgatccgggcacgtctgatgccgacctttggtcgctatctcaacagctgaacgagacacttagggatttcctaacaaagttctgatccaccctagcaaaagtcgagggaatcaatgacgtcgcgactctctctgctctgaagaagggatgtggtacaagtccgaattccgaaaggagttaaatttgtccaaaccacaaaaaatcttggacgccttgcacctgagcctcgaattatgttctcatgaggaagaaatagaatggctgtcgaaaaggcacgagccgccgaaccaaacgcctcgtggcgaaaaatcccaaccaagcgctccaagccataaaaagggcgctcaaggcgggacattcgtacaccatgaagggcgaaacttctccggagcccacaatcacaagccgatacacccctaggtcgagggtgagaccatggccaaggacgtggatgaaggatcaacccacgggaaatgagcaggagtactacaagttgcacaagagctacggccatcacacttctagatgtcgtagcctcggtgcaaaattggcagccaagttcctaactggtgaaattggcgggggcttaaccattgaagacatggaaccagagaatgtgaacgttaagcaggtaaacaccgtggcaaaccctgaacaggcagtgtagtgaccctcgctaaagggtaagcggccaaacgggaaaacatcaaggaacgaccgaggaagaattagaagagaaagaaatagttaaggaacgaaagccaaagagatgggcaaggtaaaaatgaacttggccaattctagttcaaagttgggtcatctaggcgaagccaaaacgagaggaagttgccccgcgtacatggtcaattcccatatgtgcccaaaaggtgttaaaccatcaaagggaaaacaaaattactatttgggcaaaaatgggcaaagatgggcaagaatgggcaagattgggcaatacgggcgtgccgcgggcaaagtttgcccagacgggcgttgaccgccctttgaccacgccatggacacgtgggctggcttacttggagcccaatcaaagttgcttgaagccaaatttaagaggattggagccgaagtttccttttccacgtgtcatcgtcccatttctacagcatatgtgtctccacgggcgggcgacatgtgtcccgcaaggtgtcaccacgagatgacatgcgtttgcttggtggccaagctgtcccatttataaatacttgaccaaactcgagccatttgatgagagaaaggagatagaaccgaaaggctgcccgactcataaaaattgcctttaaccgagagaaaacttgcccacaattgaaaaactctgcccgtgactaagattctttgaccgtgagggaagaaatcatgtccgtgatcgagaactcctgcccatgagcgagaaatccatgctgttattctgtccgatcaagaaccttccgaggaacccgtcccataaatgtttattcggagtaaagcttcatgaatcaaggctgcttctatcaagaggtgttagatcaagatgaggagagttaaatttagctgggatcaagattgggaagccatggaatgtccgagaatcgttgaagctaaccttaaaccttcaaccgaatctctgtgagtctcgaagcgtgtgatatggcgcatgataggtttgagtgtttgtttgggtgattgattgattttttggttgcatgatcatatactcttgcattcattgatttatttcatgaattatatgagtattgattaatggtgtgatggtactaagccgcatattagatcgtttaaattcttatgctttaaggcttatgtttgggaggttgtggtgagtaagaatattgatgattctatgagtttgagtaacaatatgtctcataatatcttaaatgttgggtcttgatacgtggtgctcgtggtacgaggcagagatcataagcttatcaagatcgtggtatgtctgaccttcgtagtgaaccgtgctattgtgggatcttgttaacgttgttacttgatcgccacttagtgcaaagggctcggagagacggggctagctaccctggccgagttgtctacacgacggtgtagcgttaggtagggatgctctggttatatgcctttgtggttgtaaagcgagagatcccgagagtttgtgtttttggtgtgggagtgtttgaaggcaacatatcgggccctatttaaaagacttaataaaacttgagtcttagttgcatgtgcatatttttggtagatgcttcggcaagctaccttttgttgttattctctgttgcgtgtttcgtgttatgataatgggatggggaactaatatctgttgcaggtagaccgagctcactaagtaatcttagattacttatgactccattttgtttcgcagaaaaccttagtgggaaccattaaagggatgctcacgtaggaacgccggtatagagtttgttgctttttgcaaaacttatgattatgatttttgttggatttgagcgtgtatgctcaagggcccattgttgaaacgttttggatacttggttgtctgagaaatttctatattataaaaaattattttcatataaagagtgtgtttcatgcgatattagtcttgttcggactgacataactcacgatcatggcaagggttgaaaagcctaaaccgcgttcgtgagggatgttcatgtggataatctggctaagggtctaaagccatttggaacctaagttgggttgtccgtgttagctatcaatgtagcgtttctgggttgcccttggcttgtccggccatagagcgattcggggtacaatttttggtatcagagcatggttcatgatgctcacgggacacacgttttctaaaagttttatcgagtaaatgagtcgtaaaagcaactaggtaaaccggtatgtcctgagttagtggggaatgggttaggtattacccttgtcgttcttgcaattgtacatttagattggaccgagaatggatggccgtggggaaccgcaaccaaaattatgaaagaggtgaagcattgtggccgagttcagtaacaagggcttgtaactcaagtgaggtcaagtggagaagcgagtgagtggttttggagaaaactaaagaatagtgaaagagaagttgagtagaagttttggataaagagtaagagccaaggtgggtgatgagatgcgaattgtagaggacaagagccgaaggtggaaagatcatttctaaggaaggaggaaaatggaagatgaatgaaatcatttggaagaatgatgagtaagacttattaatcagatttaggcatgagggaagtgatgaagctgagaagaagtaagtgattagaaggaaagagatcatttaaatgaagagtaaggagcataacaaagaagtgggtgaagaagagattgagtactgggggagcaaaacaatttaagagacataagtggtgatcacaaatcaatatatggtgagtaacgatgaagctcaagaaaggagatggagtatatttttgggatcattataaagggaaaaaggaggcgtaataagacaaggtgaggtgaattaaaaaatcgagaaggtgaagtttgatcaaagtaatatcgttatcggagggatgtgggaagaaaactgagcctaagaatcaaatggtaatgttcgaagaaggatacatgatcagagagtaaacgggtgtaagcgggatgatcaagatagagataatgcaagaggattatcgagcgagtaaaggtgcaaggtatgaaagatccaaaacttaaaggagaaagtcggtacagaagagtgatgagttaagtagttcaactgaagccgctaaagggagaagtgtacaaaataagaggaggttgtagattcaaagaagatgatgagttaaacgaagttaagattggaagcatcgtaaaggtaaatatgagaacgaaaggacgtagtaccgaaaagcgtatcaagatcgtggtatgtctgaccttcgtagtgaatcgtgctattgtgggatcttgttaacgttgttaccttactgccacttagtgcgaagggctcggagagacggggctagctaccctagccgagttgtctacacgatggtgtagcgtttggtagggatgctctggttacatgcctttgtggttgtaaagcgagagatcccgggagtttgtgtttttggtgtggggtgtttgaaggcagcatatcgggccctatttaaaagagttaataaaaatggagtcttagttgcatagaccgagctcactaagtaatcttagattacgtatgactccattttgttttgtaggaaaccttagtgggaaccattagagggatgctcaggacgtaggaaagccggtatagagtttgttgctttttgcaaaacttaataattatgatttttgttggatttgagagtgtatgctcaaggggccattgttgaaacattttggatacttggttgtctgagaaatttatatattataaaagattattttcatataaagagtgtgtttcatgcgatattagtcttgtccggactgacataactcacggtcatggcaagggttgaaaagcctaaaccgcgttcgtgagggatgttcatgtggataatctggctaaaggtctaaagccatttggaacctaagttgggttgtccgtgttagctatcaatgtggcatttccgggttgcccttggcttgtctggccatagagcgattcgggggcgttataggcagcccccacggcgaaccttgaagggcccaagagaggcgaggcaaccgcgaggtggatgatgacgagccagaagctgctcgagggagaatcttcacgattttgggagattcagctttttgtcaagacacaacggattcaatcaaagcttatcagaggaaggccggttcaaactgtaactggacgcggtcatttaacggaccagacgacgaagtcactttccatgagagcgatactaacggcctgtatcggccgcacaatgatcccttggtcattacaatgactatcagagatttcaatgtcgagcaaattttagtcgatacagggagcacgctggacatcatttttctgacgaccttgcgagaaatgaagatcgatatggcgcaagtcgtaccgactccacgacctgtgctcggattctcttgagagaccaccatgaccccagcaccatcaaattaccagtccgagccaaaggaataacaaaaatcgtcgatttctccgttactgaccagccaaccgtttataacgcaattatcagaacgccatggctaaatcaaattcgagccgtcgcctcaacttatcatctctgcctgaactttcccacaagcaacgtcgtgaagaccatctggagaaatcagaaaagtgcccgaattcgcttcatggcagcacacaaacttagaaaccccgtcaccgaatcaacagccgacgcaaatcacaagaaggctaagttgggacgagccgaagaaaaagcaatctccgagcagttatagcaactaaagatccgggaatcaacgagaccagtttctgacccagtaatatatgtttgtcttgatgaggagaacctcgaacgatgcgtggaaattggcggagatttgggcgaagaggtgacgaccgagctaacttctttcctcagggaaaacgtcaacaccttcgcctggtcctcggaaaacttgcctggagtaagcgtcaaaatcgtagagcacgagctcaacgtcgacctaatgtttaaacctgttaagcagaagaggagaaagttaggtcgggggctgtgagagccgaggtagagaaactgctaaggatcggctccatcaccgaggcgaaatatcccgactagcttgcaaatctggtcgtggtgaaaaagaagaacgacaagtggagagtgtgcttcgacttcaccgacctgaacaaagcctgcccaaaggacagtttcccactaccgcatatcgatcgcctcgtggaataaacctctgggaacaaattgctatcattcatggacgctttcgctggatacaaccagatcatgatgaaccccaaagaccaaagaccgatttctacacagagcaaagaattttttgttaccgagtgatgccattcggacttagcaacgccagggcaacttaccagcgtttcgtcaacaaaatcttcacactacagatcggaaaaacaatggaagtgtacatcgacgatatgctggtaaaatccatggaagaggaagaacacatagcccatttacgcgaatgtttccagcagcttaacctctacaacgttaagtttaatccaaccaaatgtcgcttcggagtaagattcctcggatatctagttacgcattgcggcatcgaggcaaatccgaagcaaatcgaggcgttattgggaatggcatcgcctcaaaacaaacgcgaagtgcagcatctaactggaagagtcgcagcccttaattgattcatctcccgatccaccgacaaatgcttggctttttacgacgtgcttcggggaaataaaaagttcgaatggacaacccgatgcgaggaggctttccagaaactcaagaagtaccaagcgaccccaccgatcctcgcgaaatctgtaatcggagaaccactctatttgtatgtcgctgtatcggattctgcgttcagcggagttttagtctgagatgacagaggcgaatagaagccgatcttttacgtctcacaaacatttactggcgcagaatctcactacctgcaaatggaaaaacttgcgttagcagtcgtaatgtcagctcgaaagctgcgaccctatttccaatcccactccatcgtggtaatgggatccatgccgctccgcgctgtcttgcgtagtccgagccaatagggtcgtctggctaagtgggctatcgagctcagcgagtatgacatcagtatcggaacaaaatgtgtgcaaaatcccaggtcctagacgactttatcgtcgaacaaaggaagctagggagaatccgctcgatacaacttgacaactacacgtggacggctcgtcatcaaaataaggttcgagcgtggatctccgtctcacctcacccacgggcgaggttctcgagcagtcattcagactgaatttcgaggcaaccaacaacgtggccgaatacgaagcactcgtggctgggcttaatctagctcggggactgaagatcatgaaaatctgagctttttgctcctcctagctcgtcgcgaatcagttcaacggatagtacacggctcgagacgaacgaatggaagcctatcatgctcatgtacaagatcgggtgaaacagttcgacgagttcgagttgacaaggattcctgaggggaaagtacgtcggccgacgccctagctgctctggcctcaacatccgacccaaacctgaggagattcatcccagtggagtttatcgaaaagccaagcatcgagcttgacaaagaggaacatgccttccccgtacaggttgtcgcgggttgcgaagatgcttcagatgacaggtcggaccttggttgcaattcagaatggatagaacccatcagaagctacatatctgaaggaaaagtgccctcgaacaagtgggaagctcggaagctgaaagatcaggctgcgcgtttcgttctggtcgaggagaaactcttcaagtggcggttatcaggacccttaatgacttgcgtggaaaaagaagcagctcgcaaagtcatgaaagaagttcacggaggcttgtgtggaaatcattccggggaagagccctagctataaagataaaacgccacggttatttctggccagcgatgatcaaggattgcgaaaagttctccaaacgatgcgaaaaatgccaaaggcacgcaccaacgatccatccaccggccgagctttatcaatcgcctcaccatatccatttatgcgttggtcgatggacataatcagcccgatgcacgcctcgaagtaaaagaagttagtttttgtcttaaccgattacttctctaaatggatagaggccgaatcgtacgccagcatcaaggacgctcaagtcgaaaagttttgtgtggaaacacatcctatgtcaccacggtatcccttacgagatcgttacagacaacggctcgcaattcatatcgacccgcttccaaggtttttgcgataagtggggaatccgtcttagcaagtcaacaccacggtatccccaagggaacggtcaagccgaggccgcaaacaagacgatccttgacggcttgaaaaagcgactcaccgccaagaagggctcgtgggccgacgaactcaaaggtgttctatggtcacatcgaacaacgcctcgtcgagccacaggggaaaccccattcacattagtctatagaacggaatgtgtgattccagccgaaatgacagtaccgtgtctgcggcggagcctgtctcccgagcgcgaaccagataatactcaaaggataatcgacgagctagatctaatcgatgaacgaagagattcagccctagtgcgaatacagaattaccgacagcgaagatttcatgaaggagaccgagttctccgaaaaatctttcaaaacaccgacgagccgaacgctaggaagcttggggcgaactgggaaggactatacctgatctctaaagtcgtcagacccgcgtttatgaacttgccgatctaagcggcaaagccattccaagatcttggaatgcaatgcacctaaggatatactacaactaaatccgaggtgactaaacttgaactacgaggtggcttgatccctgaaaagggtacgtaggcagctcgtcttgggatgagttcagctaccccccccccaaataaaaaaaggggggagagggtccgtatatccatactcccattcattatttattttgtaagtttccgacttctgcataaataaaaatccatttcccatttctaaacgcttcggttaatacgatgagcgacggctcggagtatcttttatgcttgctcggctatagcgcactatataagtacgagataaaatctgtcagattacttctaaacataattcttttatcttcagaaacctggttatactctaaacactggtaccccagcacatttctaaacgctggttaagaagtgaatcggatcagatcacaaccgagaagtttcactcaaaagtcctgttctttcacactagccccagtcaataaaacgcttcgggaacgaatcagtttttaaaacattcaagcaaaaaaaaatcccaagcataagttctacaataataagtggataaagccatccagacataggttctatagaaatacggataaagctgtccaggcgcaaagtctaaagaaaaacgccacgggtatctactcaagcttttcagtcgggagagtcccagcggcaagcagatacgatccagactgatcggtgacccccacttcatctgcgagagtctcgaccgatctatgacctccagggcttagaggagcaagctcaggagcaggggctttgagctcttccttcaactcagacgggagacgaatgagattcacctccgcatcagcgaaatccctgagccaatcctcaacctgcttcttctcggtcgccaaggatccaccatcttcaagcgccttaatgagctgtgcattggcccccgcttgggacaaatacataaactgatcgttagcgtcctcgaagagcgacattttctcctccacctcgccgtttgcgcgacccgagccacttcgctgtccttgagccctttcgcttcgacgagcagtcgcttgcaacgaacaacctcagagtccatcttcatgttgcgctcggccaccctgatcgcattctccttattgacaaaggcctctttctcagccctttctctcgccagttttgcctcagtggcctcggcgatcgccgcgtctctcgccttttcggcctctttcgccctggcctaagcctcagccaacctattaatcgcctctagattgttccgcatggccgtatcataagattggaccatccggttcatcgagccaacaacctgatacataaaaacaggcatccacgatcataacagctcggagaacacgccaagcatctaaaatgaataacatacttacccttagaaaatataaagcagtctcacgtactttctagactctagcagagtatctggaggcgggagcaggcgaccggcgcacttcccgacgagattcaccaaagtagccttatcttcgaaaatgggaggctcgtcatcctttttgctaccttcttcttcttcttctttctcttcttctcctcggaatcgtcgacctgtggacgcttccccgaaaccttttcaccagctggaagtgcgacgattgcttgcttgcccgcttataccgacagatctgtcagaaccgcatcaatgccatccgcctcagcgggctccgatgcggcgggcacaacagtttcaggggcaccttcccgatcctcgactgcatcgggatcgacactctcaccctcagcagcgcgtttatcatctgaaatacgcttctccttggccgcatgtttcttctcggctgcaagcctcttcctttcataaacctcccttatggtaggtttgctggtgtgcatatcgacaaggaattgggttcgctgatttgaagattccgagctggaagggcaagaaacaccatgaaataatcgaagcgcccgttcaactcgctctcaagagaagtgctttgtccaatggcacttccgggccaacaactcttgatgacacgagacgagatctacgggacacagctcgaggaatcgaattgggcgatctgcgataaagaaaattgtgtaagcaaagggtcgtaacaatcacctcaggcacgaatgaataaaccataaaatctaaactacccaaagtctccatttcgtcagaactttcccgaggagatcatcaagaatgacatcctctaaggccacaaagaagaagtgatcggtgtaggcgtcatctttgctcaggaagccttcgataattttcctacctttagcaggagaaatataatatcggtccaccacggacttcgagactcgccggatctccagataattcctcagattggcaaacgtaacctcggtttcggtctcataaccatgcaccagtatcccaatgagatgcctcaaagaccaggccgttatctaagagagagctatctgataccaagtcacgttctcttggattagccttggaactggcaaccagagaaagcaaagataaaagaatccctcgtatagagtgaagaaacctctggaggattgtcaacgctcatctgggctcggaacgcgaagagtaaccccatcgccaaagtcgaaccgagctcttaagtccgacagtgaccgctcagtgcataaagacgagccaggaggatttggtctcaccacctttctatttttcttccttttcttcttctcggccttctcgaaggccttccgctcaaacgctcgcacgatgttttccgtctcgtccggaccaaagtaaagatgctcctcgaccttaacttgggggaagaacagctcaggcacatgttgccaattcgatgctccggcctcgttaacagctgaagcgcggttctgcggatgagagatggctcaggatcttcaggtaaatctaactccggagcgatgtcagctgtagcatcctcccgagccaaaaagggcactgccgcctcggaagcattagaagatgacgctgcgttagtctcggaaccctcagatgaagtccagaccatccttcgcttgtaaattgggggaagatcatttcggtgatttgactcactagagtcgccgagaagatcactgggggacgaaagagaggcgttagaatgtgacgaactcatgctcggctcgaaactgtctgacgaaatgaggatcagaaaacgtaaattctctaactggagaaataaaaaacaactaaaaagcggcggagatctaccagaaaagaaagaccgttataagaaaatcaagatcagagaagagagaccaaacctcaaatttttcttcagaaacttcaagtgaacgatctcagaggaagagctcgatatatatagaggtataaaggtgcgtcgggtccaaaagagttagtagaatgcgtcaacggcgcgtgagctcgggaggatatagcacgtccgcgtgaatctcgggaacaagcgaaacgcttccgcttctcgaggaaaaaggcggccacacgcaatagaagtttgaccgtcccggaaactggaacgccaagagtcacgagtaagaagacgtacaatcagtccggttaacttatccttctggtcaaaaacaacgagcaggggggcaaactgttggggtcggatttcaccccagtacccgagccggtcggatggataccatcagcatttcaggagctaggctcagcgctgttccggttcgggtgttactccaggaaacacacacccagccgggtgcgatgaaacattgtgacccaggggaacacctcaaataaactatacttggctcgggtgttattccagaaaacacacccgagccaagctcaactatatctcggggatcgcttgggctcggcctggaaggcgcggcattcggtccgagcccaaggtagaatatccacccgaggaggatacttatacaaattcagtgaagggtcaagatatcatttcaaaaatatctctgggatattatcggttatggaagtttcccgaaactcccgaagaataaggaagatttccatatagaaaagaacccctatcgccgactcggagataactggaaatcttccgagaatatcgcgagaggcggtttaccaaggtcctatataaagcgcctcaaggaacgaacaaaggggacatgcataaagacgctctcaacttcagactatcaaaacgctccgactttgaagacaaaacacctattttttacttttctaaacacttgtacgatcgaatcatcatcttttcaataataagatcaagaacaccgtccacggtaatcaaataattctgttgttctttgagagtctcacaaagatctgttctttgaagaaaccctaaatacaattcgactgtgtgagttttgactctcacatgtttaatgctaactttttaaactctagaacaattacacttgacaaatcacaagaactaaagtaacacatcacaaataacactctagcacaatcacaatcataaatcacaaatcaatctctagctgctctaaacacatcactaataagatgaaaaggagagagatagattgacagagagcttctattaccagagagtttcaatgcatgggataggaaccttggacaaaacaggtaaatgttgtcggcctgcaagattaagcaaaccatctaacagctcttcgtagtctaggtctggattttcttcttcatcatcatcttcttcgattggtatgttgttgtcgtcgtcatctgtttcttcgtcatcttcctcttcgtcattttgaggagcaagaggcggttattgaataacaggagaccgtggttgacgagcaggaagaggttgtgtcctcggcgggtactgggatggaagagttctatgagattgtctctgatggattagaggagtgagaagacactccgacaccactccttcctcctctcctcccacctccgccactattattcatagtccgactcacacttggattcgatggaggttgaatcaaaacaccgcttggatctgttggatttggactcaagcctctgcttggtttcggaggatctgcccttttacgcttaccagtggttggatacggaggattcaccggtaatgtcctactaccacatggcttcgccggatttgacccagtgaagaccctcagacgtgattgagatttgccaccgcgaccccttgtagactttcctcccttcggcgacattagattgaggggagattgagaagagatcaaggaaagattgagaagagactgagagagattgaggagagaaatcgatttgagaagagaagagagttgagaagttttgagagtgaaaccctaaatggagaaagagaagccgcataataaaaaatcgactaagtgtttacatagtaaataacgaagaggagtccttaatctgtcgcaaacgagtcacaacagaaacgaaattggaggcaaaattcatctcccaaaccaaagcccaattccattaaaataaaagcccaaaattcatcttcaaaaattgcgagtatcaaaagagtccgaatacagtcgcatattgttactcttttgtgactccttggtttaagtcacaaattgattttttagattcaaggcattacagatcaaaactattgataccaatcactaaaaacaaacataactgtaatctagagtatccctattagtataagagtttaaaacattgatttgataactttattttgatatttacaaaaaaatcaaatccttcttctaaacaaacatgttaaacttaagaatgatttagaattaatgatattattgtgttcaaacaatgtgatttaaagcttttagaaacttttatagtgattaagttttattcaatcaaagtatatatgtatatataacaattctctaaggtgattttccaaattcaaaaaatcgcgagtatcaaaggagtctgaatgtagtcacaaagtgttactgtcttgtgactcctatgtttaagtcacaaattttttttttggattctaggcattacagttcaaaactattgattccaatcactaaaaaacaagcataactgtatactagagtatccctattagtataagagtttaaaacattgatttgataactttattttgaaatttgcaaaaattcaaatccttcttctaaacaaacatgttaaacttaagaatgatttagaattaatgaaattattgtgttcaaataatgtgatttaaagcttttagaaacttatagtgattatagtttactcaatcaacgtatatatatatatatatatatatatatatataacagttttcttatgtgatctttcgaattccaaaaatcgcgagtatcaaatacgtccgaaagtacaaatcgcgaccttttgtttataggcagaaattagtcggaatgtagtcatgaaatagagactatattgtgacatattgtttgcgtcctaaaatggtgacgtaattgcttttgtatttcgtctagtagcgaactagtcgtaaatgaatgacaaagtagtcgctccgtgttgtgaccaaacataacgtcgcaaaatatgtattgaaagagccttaacctagacatattgtatatcaaaacttcaaaggatatagtagtcacataagcaacataagtatgcttcacgagaaaaaatcttgaatgattaaaaaaaaaacgaatcttgagacttggcacttgcagcaatcaaaagattactaagttccatcaaaattcacaagtgaggaagacaatgtatcaatgaccactttgtctaaaccaaaatatgaaaatagatattagaggaaatgcataacgattaagctaagcttggtacagaaacagagaatacaaaatcccaatttacgcagaattatgttaaaggaattagcagtaaaaatcatcgttttaagctatgcaataaattacgcaggaatcataaaccttaaaactgctgatctaaacgtgagatcaagaaagtaatgaagatccaaggttgctaatagaagaagtacgaaaacagagtttcataagatatattgacaaaacagagtttcatcaatgtgatcttaccttgaagaaaactgatcttcttctcacctacaagtatgaacacaatgctatctaaattactgaaaagatacctcaagggaaatagtataactaaaggaaagcactatgtggttgtgtaacttacagcccttgtgctcgtttagatctttatcgcagctgcaaaatctgcagaagataaggaaacatgtagatatatagaacaaaatgcataatcttaaacaaacaagttacaaaacagacatataaacataggaatcaaacataaaacagagcgtcaaacaacaaaaaagaaacgattaaagttctatctcttaatccataaccagaaaaagaagtctagacataaaacaacaaaaaagaagcatcagacaatcgattgaccataaaattagcaccaaagaacataaatttctagcaaaaatagataatagagggcgatttcaatttcacaaccttaatatcatgcaaacaaacaaaccctaactcttattgttcaacaaaacctattgataggcaaacacatttagaaaagaagagacagaccatgagcttatgatgatgctttcgccaacagaagatccgaagtttcccaacacgaagagaagagaaagagaaactgagaagaaaagagaaagaaatggaagggaaactgagaagtttcccgaacataaataagaatgacctaaattttggccaattatttagcgcgtgttttctctcaatttaattgcgagcgatgtcgctaatttgtcgctattaaattacgagttccgttgcaaattcgacgcaaactcgttgcaatgtaatgagtgttggactcaaactatgattaatatctaaattcgaattgaggaaccagagattgagactagaagagaaagtgaagaagattgagaagagaagacgtaagaagaagaagcgtgaaagagggagaagaagaagatgacttcggtttaagtgtgaaagggctttcgggccacaaatgtacataaggcccaactagtaagtgggtttagaagtttgcacaaaaccatagattatatggtaagtttattattcataataaatataaatataaattaaaattatattcaagctttattattcagaataaattaaaatacaaattaaaattatattcaactttattattgataataaataaaaatacaaattaaaattatattcaaacattattattcattatatataaatatacaatcattttaatcctgatattcttcttcattagaactatcatttgacttcatctgagtaatcaccaggttcttctagttgtcgattgtcttgatcaagatgtacgacgctttcgagtgtatgttctggaacatgaatctctccttgtgtgttttgtagtggtacttcatcagagactccaacaatacgacctcttggtaaaatttcaatgacagataaccaagataccgcagtttgccgaatcttgggatatggaatgaaactgacttgttgagcttgagcagcaaggataaatggttgaaacctttgatatctctgagagtcattaacatctacaatgccgagattgtgtttcctcacaccgcgcttgataacaggatcataccactcacatttgaataatatgcatttcaaattaaccaatcctggatattgtatttctatgatttcttgcagcactccgtaataatctgtttcaccacgtactaaaataccaaagtttgttgttgtccgatgctgacagtgagcttgcacatgaaaagcatatccacgagtgaaatacatggatgcagtagtaattatcgcaagaggaccttggattaactcgtgaaaccaaacgggatgtctctgtcccataatgtacttgtaaaatacaacattactaattagataaacatatataagataaaatgataataatttgatatataaggattattaagttattctacatattgttttaaccatcccgcaaattccctgtctcttagcttcgctatttctttctcagatatatcggaaaatgtttttttcacttgtgttatgaaatactgcaattagagaggaactagttagcaatgatattaaattaatatatatatatatatatatatatatatatatatatatatatatatattgtgtaaaagatacctttcaaatggttgaacatattcgcaatttagaaaaatatacgtgtgggcactttgacgatctttatcggaccaccaaatttttttaacttgttcacttagtcttccaatttgtgcaaatatatcaggaacacctgtaacaggatatacaggtgccgcaccaccatcatcataccgtcttggggcccttttccgtgttccaactatatgcggaaagtagtaggaagagaaataagacgtttcttcggtcaaactccctgcaataatcgagccttcaactcttgcaagatttttagcttttctttttagatgttttatgaatcgctcaaatgggtacatccaccaaaattgaactggacctccaagggatgcttcatgtggtaaatggatgggtagatgttccataacatcgaaaaataaaagagaaaaaattttctcgatgttgcacaataagatcgcaatgctattatctagatgatctattccgtcttccgtaagagtccgtgtgcaaagatcacaaaagaaagttccaataatagcagattatgagtataattacatatattgctaactaaattaattaaattatcacacatacctacaactgcctcatgaacattttttggtaatagctctttgaaagcaaatggtaataggcgttgcgtaaaaacatggcagtcatggctttttcatacccgaaaactttttgccttgctcaacattctttgaaagtttagacacataatcatctgggaatttgacatcagatttaacccactcaaaaagcgctgtctttgcttcagaggataatctaaaagttggaacgagaaccttcccatctctcgtaagatgcaaatcaggtcgcgaacatatatcaggcaaatccagtcttgtttttaagttgtctttactacgcccctgcacattcaaaagtgtatgcatcatgttatcaaaaaaactcatttcgatatgcattacatcaaggttgtgcctcaacagaagatccttccagtaaggaagctgcaaaaaaatgtttttcttgtggcaattgtgattaaccagatatcaatctggcatattggcggggatgtgccaattatccccacatgaaatatctttttaagaatcccaataatctatctgctcaagcaaggcttctccagaaacataagctccaaatggtgattgagaaattgaaccaactgaatgagatgaataattataagttgaacaaataagttgaataataaaaatgagctgaataagatgaataagctgcagagaattaaaaagtatgtcaaatggtgagcatttagctgaatagttaaatgtagagaaatattgtttaaaataaaatctaatgttgccgacgagaactacgtcgacttgcagaccacatttgctcagcaatttaatcacggacgatcttcatataattcccatcttgtgtttcttcttccactccaacactttgatcatcattggcatcatcactcacattttgttgcccatgtgaatcttcactttctttatttgcttcttcaaagtcagcatcttcaatgttgttccgccgaataaaattatgaagtcccattgtagcaaatatggcacgtctttgtactgcaatattatatcttggaaattcatttaaaaccctccattgttttttccaaactccgaatgtacgttcaataactgaacgaagggatgcatgtcatctgttaaacatctccttgctattctttggcggttcaccattgaaaaactcttgtagatgatatcttgtgccagtattactttgttttctatatggagccaaatatccacttttgttggcataaccagaatctacaagatagtatttaccttcagcgggcgtaggaaacataggatcatctcgaatcgatgttgataacacacgtgcatcgtgtgctgatgccataccaacaaaacaatatgtaaaaagcatatcgaagtcgcacattgccaagagattgagacttgcattttctttccggttcacaaatcgaatggtttcttgtcctggaggcatcataacaggtatacgagtcccgtctaatgctccaataaatccactaaagtaaagacaatatctcttatctctttgtagacggtttgctatagcttcaagttcttgggtagttcttggccgtatgtagtccaccgccatacattccattgctccaaacacttcatgaaacttccgacatattgtttcttgtgcatgaccaaatcttagaccaatgtcaccttgagtgtcattctgcccacaaatcataagaaagatcgcaacactctcatcaacagacatattttgcgtgtcttgtaagctatacctctcttgtaatatttcacacaaacgttgaaatgctactgtactcatccatatcagcttttgacatgcgatttcattgtcatagatttgattttgaatcattcgccatccactacctatatcttgtgtcactggttctttacaaaagaacttgccataatattccatcaaaggagagatgtgggtgtctaagatttcagcttcttcaagtaaaatcagttttgcaatttcttcatctgacagattttcaattcctcgtagatgtagttctgcaatagagcttcctaaaaaaaaaaaaaaaaaaaagatttgtcatattaaaatatagacatgaaccttaaatattaaaatatagacatcagacatgatataccaaagacaaacacacgtacatactcatcgtttaccaagaagaagtgtgaaactaagtcaaaagcattacacgtacgtacccatacatgtttccttaaactgatattatcacatggaataccatatctatcaacgccaacaagcttttccaagaactgaattttgatctcttcactccataatttcataaatccatcacgaacatcctcgtcgttcatcagcaacctgtttgcttcccaccaaaacttttcccatcggttcaaccgacaatatttctagttcagccaaagcatctccaaatgtggctttttgatgatgtcgtgaccttaagacatccagtaaacctgtacgagactcttcaagacgttgaaaccatgtcttaacttgagtctcaaagttgtttcttctatactttgtacgtctagtagtcgtctttcgaacacccaaatttgatctattggtacgggacggagaacttcgtccttgttcattagtagtgggtatcggtgatggagcagctcgttgaagatcctcatcagatgttagctttagaggaaattgactcccattatcatctgaagcttcatccacttctacgtcatcatcgctaggcccttcattttgactttgttcgaggtttgttcgtagagtatgcggagaataatgatcatcctgctccacatcatgttggctataaatttgatcaagtatctttttgaatagaataggcctgttttgcaacactcgcacatgtttgccatttctcccaaattcctgaaatataatgataaaactaattataaaatagaattatatgtaaatataaatagatattatatgctaatatgttttaagaactcacctgaattctatctttccaccaaacgtcggggcatatctatctttcctattatcgaattaatcgaaataccagtgcggtcacttagtattttgttacactgccacaaatttcgcatatattcgagtctatttttcatctctggcttcctagttaatctaactcccgtcaactcaaaaaacttttcctgaatttttgctttccccggattgtccggcactcttgtgagatagcttttcgatttaagcttggtgtttacaagttggagaaaaattttggtatatctaggactctatatatactgataattttaaagcatataagccaaacaaatatatgatgacatgtgtttatataaacaacgagataatactttaggttcctcagtagcttttgctttgccctttgcttaacccttagaatttgatgatggagtactagtgcttccatttttgctctgtttgtttctaataaaaaaaaaaaagagacattcaataaacaaaagtaaaatgaatgagctagaagcaaaattatacaagtgaatcaaattattgaaactaaacaaatatgaccacgattgtgtttataagtaaattgaagtagtattacctttcactcatgattgagtgccaacgattggttatgaaagaagaaaagtgtttagttcattatattttttgtgaagataaatcttgatgggaatactatatttataggaacaaatattagatgttagtaaaataaaaaatgaattattcaaaataagcaaagattgagctgatttataggaaaatattatagttgttgatttatattcgacaaaaacaagattacaaaatatttaaagatcgaactgaattagtttagtatttgaatttcctagattctctaaacaaattaattaatttaaatatgataaaaaaaatattacaaatttttctcacgttcaattcgtttctctcctattttgaggctgaacaattttcatctaaaaagtgtaaattttcagctttatggtgggtcccaaaaaaattgggttgaatctttttttaaagcaaatggtgaatttctggaggaataaagttgaacacacgattcaactcttccaacttagcaaatctatgtatccatttgcagccatatacaggtggaggttcacataccactttgttcttcttaaaaaactttttgtccttcctgtacggatgactcatcagaagaaaacgacgatggcaatcaaaccagcttgtcttacgaccatgcttcagttgaaatgcatctgtccgatgaatgcaataaggacaagataacctgccatgtgtagtccaacctgatagcattccgtatgcaggaaaatcacttatggtccacataagcattgcatgcattgtaaagttttgttgttgtgagtaataaaatgtacgaactccggtatacaaaagctgatgtaattcatggatcaaaggttgtaagaaaacatcaagagaacgtttaggatgcttaggacgagggactaaaatactcaagaataaaaattctcgctgcatacacatagatggaggtagattgtatggtatcacgattaccgaccacaaagaaaactgtcgactggacataccaaatggactgaacccatcagtgcatagaccaaaataaacatttctactctcccttgcaaagtcagaatgtaccgtgttaaatggttgtcaagccttcgcatctgatggatgtgtgacctctccatcttcacgtgaatgctcagcatgccatctcattgatgcacatgtcctttctgattgatataatcgcttaagcctatccatttttggaaggtaccacatatgttggtacgggatcttggttgtcctgaacttggcttatatcttggcttcccacaaaatcgacattcctgtaattgaccatcttctttctagaatatcatgcaattatcaatgcaaacatctatcatctctgatggcaacccaagactatataccacttatgtatctcataatatgactcaggagcaaaattatcctctggcaaaatatcgttaattaattgagcccatgaatccatgcaaatctcaagtaagttgttatttgttttaatgttcatcattctagatgcaactgataatctagacattccttctctacatccatcgtagatcggttgatttgcagcatctaacatatcataaaattgtcaagcatctaaattaggttcctcatggttatcgatgattgttgttgtttcaagaaatgcatcatggaccataaactattatgattttgttgactataatcaaattgttgaggctcaaaattgatattaggttcctcttcatgttgaaaactagagttactagacgatgcattcaccatattttcctcaccatgccaaaaccaaatataataatttgccatgaatcctctattatataactgctttcatactgttttgaaagaaaatagcgaccatttttgcactttcgacatggacaagacatattacaatttcttgcgtgagtggcaattgattttcgtttatcatgaattcttctagcccatctgcaaactctattgtcattgatccattaacatctttgtgcttatacatccattcccgtcggatataaatctcgtcacacgccaacatattatatattattttgaaaataaaagaaatataaatttgagaagaaaagatttgaaagagagatttaaagaattatgttccttactcatcccaacgtggctttatataggcacacaaatctgtttgcgaggtatttgcgacgaatttttgcgactatattgcgagaatttgtaaactaggtaggtagcacattttaaaacgtttctcacctaccatatatatattcgtctcaaatgcgtcacacaattgcgtcgaattgatacacgcaaattccacgccaaatgtgcatgtagtttgcgatgaatttgattggaactgttgacttcgacccacattcgtcgctaattttacgcttatccgcctcgaattagggaggaattatttcgaagcatatttgcgacgaagttgagacgaattacgctattccatcctaattcgtcgcaaattacatgcttatctgcctcgaattagcaacgaaattgttccaagcaaattagcgacgaatgtgagtcgaatcgttaatgcgatgctaaatccacgctaactacatgcgaattagcgacgcatttatttttacgcaatatttccacgctactcatatgttttcttgtagtaaaagataaaaataaaaaataacgaaagttcatgtcttgcaacttaagtttttcggttttagttttgacttttgaatatagttttttaggttaaaaaattatttgatcccttaaaaatttcaagattatcattttttttaatgaattgaacagaaatccaaaaagtctacttttaaaataattaactttaatcatcattcacatcttttccataaatcatttttatgaatatttatcttcaatgtagctttcataacagaataaacacttaattcattgaacatgtgacaaaattaaaaaattattatactactacatcatttgaccaataaaatattcaagaaaagccaaaaaagtgaaagagttattttaaaaagagtactaaaacccaagtgacctttgaaaataagcactctacgttatggtgttttgaaataagcactctaacacttctctctcatgttaaaatgacgcttatgtcctttctttggtgatggttttacaagagtttttaatattttgaacaaaaatattttttatttatggtgaagaaaatagatgtgaaataatatattgacaacttatttatcttttattatagaaaaaaaaagattgtgaatataagatatgtaaattttgtgtagacaagaaatcttttctattttaactatcttttttgatggacatataatataaatgtcttttttatatgtaccatgattattttttattatgttaaaaaactgataaactatttaaattttttaattaggtatactattttaaaatggtttatgatatgcaacaaaacttattattataattttggagaactctgtaatctaattgagtgaacatttttcaactatgatccatcgttctttttttaatattatcatcaggtaaaatagttacaatagttacattattgtgttaagtttctcgtttttttattttttattaattttgtgtcgtaactatattggtttgggttcaccaatttttgactagggtttagttttttcttctcagttttaatattggccattttctaaggtgattaatgcattgtgtttgagtttattttttttattaggatttagctttctcttatttagaatattgtaatctcgtatagtagttaacgaattatgtttgggttccatttttacaacttagggtttaaatattatgtatgaatggtttctattaattttcttattttttattttattttttactagttgtgtgccgtaactaaatctgttttggttcaccaatttttggctagggtttagtttttttcacattttcaatattggccatcttgcaatgtgattaatgtgttgtgtttgagttcatcaattttgttttattaggatttcgctttctctcatttagaatatttcaatctcgtaaagtagttaatgaattatgtttggattccgtttttacaacttagggtttagatattgtgtatgaatggtttctattaattttcttgttttttattttctactagctatgtgctgtaactaaatcagtttaggttcaccaatttttggcagggtttaatttttttcatatttataatattggccatcttgcaagatgattaatgtgttgtgtttgagttcaccaatttttttattaggatttagctttctctcatttagaatattacaaactcgtaaagtagttaatgaattgtgtttgggttccgtttttacaacttagggtttagatattatgtatgaatgatacactgtaaaagtaaatgtggattcactagggtttaaatttcgtgttttttataatgtgttagaacattgtgtttgcgtttttaaattacagttaagagtttatctttttctatttttgatgttttatttgaatgatgggataaatatttggcggttaggatttatgagtcgttgattagggtgtattattattttatttaaattattaagatagttaagttattgtatttaatttttttaaaaaaactattaaataattaagtgaaaaaacaataagaaaatcatattgaaaaaagaaatgcatattgcccacatcatctgatatttgcaccaatatgaggaagggtacaatggtcagcaacaataaactattgcctttttattttcatattatatttaatagggtcttttgcagaaataaccattttgagaaaagtaattaaatttttaacaccataatatgataaattaagtaagtaacatgagtggtttttaaaaagtctattttttccttctgatttggtgtaggacgtgcgcgtgaaacacacacataatgaaagaataaagaagaatagaagaagagagagaataatgatgatacgacattttttcccaagtgatttgaatgttagattaatttcataaaattgactaattaaatcatctaatagtttttaataaaacatagattttttcggtttataacctgatttaaatttttgaaatctgatacaaattattaaaatagtaaataatatttgtctaaaacacaccaataaaatagtataaaataaaactaaatagtatagaacgaacaatagacaaacaaatgattgagctaaaccgatctgatccaaaaaaaactataccctatgagatacaacattggcaacccaagcaaccgaagtaaatcgcagtggtaacgttgacgatagcggtggtagtgttaacagtagcggtggtggtgatgacgacaatggtactagtggcactaatagtgatgttgacggtgatgattgtgtcgatacaattgttgcagtgatagtgataaataatcgagttaaaccgatctgatccaaacaactatatcctctgagatacaatattggcaactcaaataatcgaggtaaaccgtagtagtgacgttaacggtagcggtggtgctggtggtgacgatagcagtggtagtggtggcactaacaataacgttgacagtggtggttgtgatgatacggttgtggcagtaacaataataaataatcattgtgacttcgtggtagatgcgataatgaaagataattataataagaatcttatatattttttgttttattaagatagaatagaaggagaaaaaacaaagacttaaaaaaaaattaaaaaaaaaaaaaagaaaaagaactatgtatcctgcaatatggacaaactagattttaacccgcagtagaccgcggaacgatttattttttaaaaataatatattaaaacttgcaaattttatttttataaaatatttatattttacagtttataattgctattaagtaacgctataccacgaatccatgagacaattgttaaaaaactgaagttttaacccctattaaaacagcatattaataatattttaaaattttctaatattgattcaaatacatccaccatacaacccaattccaaaataaaacccgttctgtcatttctttacccgtcccgtgatttttttttaaagtagtaatttttaaaatttaagaattattttttatatataaaagttttgtaaattgtatcattctctaataaatttatattttatagtttaattttatatatagtaacattatacataccacataacatttttggttttatataatcttttctaaattaggatgattttatatgcttaatattagtggtcttaaaaaataataaattaaagttttaacccgtattgaaacggtggattaattatattttacttttttattaatgttgattcaataacccgtccctccaaatccgtcttgcaaaaaagccatttattttattaatattaagtttattaatgatatgactctgagttataatctaaacattttagctaataacataagagtgcaccatatttatttaataggggaatgtaccatatgacccgaatgcacttttacccaaatccaccaaaaaagtcttgcaaaaatactatactgataagaaacgatagtctgttttgataggtataagattagcaaatatattagttagcttaaattagttaaagaatacaaattgaaaaggtatattatactttattcgaatatagtatcaaaacttatataacatagtgttgttgtttatagttctgattcaatttcattggtttgattggtttaatcagactaaggacattggaccaggcggttatctccggttttgggatggctgagtaaaccgaaagatgatgaagtaaagaggagtctctaactgcagtggagggtcttcggttctcacgggataaggttttaaccaacccgagtttgttataaagtcatcatcactttcttcttcctttgtaattcttgttcttagagagagagagtaacagagagagaatccgccattgttgtaagctcaagtttgagcataactcttcctttgatctagtgaatttgccggattgattcggctccggacgtaggttagatcacaccaatctagctgaaccgggttaacaaattgagtcttgtgttcttctttacttgttcgttcgtgttcttgagctgagttcattgtgagaatcggagattgaatctataacacatagagatttgataaatttttaattgttgaattcttttttttgtgctaatttttatgtgattaagatttatttgatttcatatataaaatactaaattgttttacgaacttatttgtttataatttggtaacagatagatattcgaatattcaatatattttgcttcagtttagaaaatctttgatgatccgtctttagatccaataagccctataatctagatattaacctgcagtataccgcagataggtttatattttagttaaactaaaattttttattgtaaagatgatttaaaaatatataatattattttattttattttaaatgtatagtaaactgtgagttgtatatgttttgttgatattatctatattgtttaatgtttaagattatacacttgtagtttgattgttaatttaagagttccaactgtagtataccatcttgtattaatattgatctaaaccgtcaattctaggattttccagcttgtattaaaaattgaatcacatcatacacataaaaaaatctaatatattattaattattgtagtatataagattataaattttcaatataatatgtatgaaattgaatataaatatctcaaattatgacccgttactcagtagaaagttttcttaaatctatttttcatccgttataatatttattcatgtattgaacagtttatattcgtttttaaaaattcaaattatgcatatgcaaaaaaactctaattcttttttttttataatgatgatattattttttcgcaaaaatagaatcatataaagatgagaagtgaactataataattaataaaaaattaatatgataatttagatatcaaatctaatttgttgattttaattggttatttttttaaaaattaataatgtatttcgtttttctaattaaattaaattaattaaaatttatatatcaaatcttatatgttgattttgattggttattatttttggaaattaataatgtatttcgttctttaattaaattagtatttgactttctaatctttaaagagataaattaatttattctttaaatttttatttctaatagcatacctatgtaattacttacaaaaattaaggttacatttaaaatgtacttcccaaataatatagtaggatatgacattattataaattgtattctattgtaatgatatggttagaataactagttacttaattaaagtttttttttggttatacactcaaatttccgtatctaatatgcctaaatccgaagatctttaccaatttgtgcctattttaataagatactcttcaaacaaaacaacaataaaaatgtaggtcccttaattccttaattttgcactttgcacagccaccagtgaggcagagatcttctacgacagagataatacaactttcgtactcaacaaaaatctcagtcgttgataaaatacacgtgttaaaatctaacggtcttgataaattaaaggaaaaaacaaaagctggaaacaacagagacgtaaaaacgatagtttaggaaaacaaaacaaaaaagtgttctttgatcaatcaataatcattcatcagggccctgtgttctctgagtcaagtaagattcttttcgacgattccatttactctttgattagggttttatcattctcaatcagggttttagtttaaacatcgaattaagcactggattagctgattttgtgtgatttgatttcaaagttcacagcttttagtttctctgatcctaatttatgatttgaagtttctatcaaaaggtttgatttttatgttgactttgtgatgatgttaaaccccatttagctttggatcctagaattgtctttaggattgtaaagttttagtttttattgaatttgattctgttcatggtagcttcttctttaacacgtctctttggtttcatcaaaagccatatttaactttgcctaagtggacataaatttcattctctgagtactgattccatatcctttatgtaatgtcctttcactatccacatgtagatgcttctccatgtagagtttgtgatctagagcaaaacaaaaacgttagaaatattcttgagagattgtttcttttgactagatagtaagggaattgattcaatggttcatctcctttgcataaagttatattctgtgtattagtgtctcatttctcgttgccattcaacactctgaattaggatactgtgtggtgttttgcaaaactgctcttgtgctatgactctggctaatgatttcggatattcgaccgctatgtcttcatcttattcagctcttcatactagtgtagaagacagataccacaagttgcctaactctttttgggtttcatcaggtcaggaactgatgaataaccctgtaccgtgtcagtcggtctctggtggcaattctggtggttatttgtttccttcttcctctggatactgcaatgtttcagctgtcttgcctcatggaaggaatttgcaaaaccagccacctgtttccaccgtgcctagagacagattggctatgcaggattgtcctttgatagctcaatcctcgttgattaatcatcaccctcaagagttcatagatccacttcatgagttctttgatttctctgatcatgttcctgttcagaatctacaagcagagagtagtggagtaagggtggactcatccgtggaacttcataagaaaagtgaatggcaagattgggcagatcagctgatttctgttgacgatggttctgagccaaattggtctgaacttcttggagattcaagttcccacaatccaaattcagaggttcagtttctctagccatatatggtctctatgtttgttggttgtccttatgttatttaatcagtgttttgcataattggtatcagatacctacaccatttttggatgtaccaaggctagatataacagctaaccagcagcaacagatggtttcatcagaggaccagctcagcggcagaaactcatcatctagtgtagcaacatctaaacaacgtatgcgttggacaccagaacttcacgaggcattcgttgaagctgttaatcagcttggtggtagtgaacgtgcgtaagctttctccttctattgttcctgaaaataattgctcaaggatgttaaccgtacactgattcttctataatttccatcataggagccacccctaaggctgttttgaagctcttgaataaccctggcttgaccatttatcatgtaaaaagccatttgcaggtttgttcttatccatatactattttgttattgtatctcatactgcttctctgctaagctaatttctcatttctcaccgtctttctgttgaacttcttttctacagaaatatagaacggcaaggtataaaccggagacttcggaagttacaggtaaggagttaaaatactttaacataatactactgcactttttctaagctttaaagtattggtcactctctagaagaacctaaactctcgacaaacagcttacgaatgtatgaactttatttatttcttgcacaggagaacctcaagagaagaagatgacatctattgaagatatcaaatctcttgacatgaaaacgtaagaatcttcagtcttctgactgcataacaaaccagtaatctttcttcgtattcttcagatattcttgtatgtatattttgctagatgattatgttactatttcttttccaggagcgttgagatcacacaagctctacggttacaaatggaagtgcagaaacgtctccacgagcagctcgaggtaatgattttacatgcctaactgctaaaaaactatccttctttacctgatttcgaacttagatagagtagtagttgtgaatatcatgagtattatctgattttgtctaaaccatatgccagatccaacggtcactgcagttacagattgaaaaacagggccggtacctacagatgatgttcgagaaacaacaaaagatacaagacaacaagagctcttcttcagaagcatcaccaaagcaatgcaatggttcatttgcagaagttgaagttggtcttgagacactaacaggggaccaaaatgaatctgcttcagcatcaaggaaacgtgtcagagaagattaaagcatgtttaatttgatctcgtttgacgaaacatgtttattgggaattaattgtggaaaccaactccagttttgttaaaagaatctgtttctttcttagctctgtattgttctagtttagaagcagttgatttggccttgcatggctgcaacactaactaaagagtaaagactaattgtgtatatctacatatacatttttggggacgatttgtgtcgaaaaatcctttttcaatttttgatattgtatgtttagtccctacaaaatcaatcagacaagatattttctttaggacaatgaccaaatttttgattaacaattaagatattgcactaactacttacctaaacatagatattgttaattactaccctaataaattgcacaaatcaatccctaaaactataccgaattcattaatgctaaaatcctaattaacaaaatccggaaatcaatcataactaaccatatttacaattacttgattcgaaaataattttagttttaaatgctaatgatatcttaccaaaatttattcttcttttatcaattgcaacacaaaatccggtaagtaactatgcattaatttttgttacctcaaataaacatacaatatactagagaaatctgtatttttgttcttaattggctttattcctaaaaatatttatacaaaattttgtttttgatttgaaaatatataaatcgtatatgtagttataacaaaaaactattttcaaatcaaatagaattctagaataaaccgtaataatattttaatgccatatctaaaaaactctataaattgatatattgttctaacaaatcaatatttaataagaataaattaattttattcacgttttaatttaatgctaataaaaaataatttattctaatggtttttagttatgacattaaagatttattgccaaaaatgaaataattcgaatgctaacaataaacataaatgtgatcgagttctttcctacaaaaatggtaatctttaacatcttccatagctaatttatattttttcaaattttgagttcaaattttccttaattttcatcaatcgttgttaatatattttttgacaagatttctctacaaaaaaggaaaccacattaacacttgcgtattgtttttgtttagatttgtaatctaacaacaagcatatattctcaagatattcgaatatcagaatattacctaaactaaaatatctagaacattctaacgtaaatgtgttaacaaaaatatttttattgttatataatgattcgcaatcttcccttaaacatgtgagtatcattctaatttttgatttgtatctatgatttttctacttgctctccaaaatattctcaaaccgtcaaacagatgcaaccaaaaccttaagattatcgtctataaataaccatctcatatcaaacaattaccacaaccaatttgcctcagtctaaattatccctcataattctcatatagcaaggtatttcttattcatagctctagatatgttttgctatacagaatatttatcaatgcttgtgagacaaatttaatagattgagtttgtgattttgttgtttgttaagctttatgagcaagctattaagtatgagaaaggttcgtttatcatttctaatggagctttggcgacgctttctggtgctaagactgatcgagagataagcgtattattaaagatgcaactactgaggatgagctttggtggggaaagtgagtattcttaatccttaaaaactaaagtttgtaatttcattttattttagtttatgattaagggaaattgaaaaacaaaagtcctctatatccaaatttcccaaataactttcttctttctagattctcccaaataactttggtaaaaaaaattattttatcatttcatttagttttcaaattttattttattttacaccacgggttaaatcctataccacattttttgtttgcatgcactttaagttattttacaatttagttaaacttacttaattttgaactttatgatggtaacttaataacattaatcttattcatataaatatttagctatatagtaaatgccgaataatactataatataactataagagctacatcttattaaatatcatatattttatagtttacaaaatcaaaaatttataaattataaaataaaaggaaaagaatcaacccgcagagtaccacttaatatgttgatatccataatatttagattctataaaaagtttgtaatattaataatatttgaactctagaaaaaataaatttttatacgataaaaaccatttgaaagcaaaattttatattgactcaaattacatgtaaaataaaagtactactaaaaataaaaataacaaaattatgttaaatttcaagggacgaggttatatggtgggatgggtttgagttagcctaaatatgaggcggcataccacatataaagtcctaaaatatacaatcaaaatccgattatacaattttaaacactaaaaaaaaatagtaacaaaaaatacaacttaaaattttaaaaattatagttacaaaaaagtaacccgcagtacacaatggatcatagccatatgttattaatattttaaaaacacgtaataacacaccataaaaataaacacttatatattagttaagaaaactattttaagcgaaatacttttatttttaacaaaaaaaaatactatataacaaacacgtaataacacaccaaaaaaatacacaccctatataatgatgcgtataataaacagatttccttaattaaacaaaatcaaaccaaagaaatacaaatataatatcaaaaataaatagatataaaaagtaagatgagaaattcaaaatataacttgattatttaaatatagatgatgtagaattaaaaaagataatataatttctattgtaaataatcaatccgcggtgtaccgcgggtcaatatctagtgataaaatgatttcgataactagtccagacaccctctgatattttcattgtgtggctggtcggaccggtccaattaattggtccgggtttatatttctatttttgtctcaaatacatatgaagtaataattgggtctggctgaatcagatgcatctatgatggatcttttgtcgatccatcattattgggctggattacttttttagttttgatttttgaataattaaatgtttgcaagaaatcaaaataactaaaaagtttctaaaatctttaaacatttcttgaatcctagattctgaatttttagattcatttaaaagtccaaaaaaaacttcaatattctttgaaattctacaaattaataatttatattttcagatttaaatatatgtaatattatgggaattggacatgtttaggcacttgtacaaacttttattccttttgaggcacttctcacgtacaaggcacttttccttgtttttgaaaaataaatggacaattatatccccacccatctaaatcaaaaatttacttaaccggttagaaaggttttgttttgatttggttcccttctaatatatcgacagttgatatttacagatgagaaaaggaagttaccttcgccgacttaaattatctcacaatatcaatgtcgatggttgttaatttttccgaccaagcaattactatggaaagtctcggaatctccgggtcactgtttcttgaattggttaatattactgtgcaacgatctctctcccttcaaacaaaacctctgaaacaatttaaattgagttgcctccgccttaaccaaggcattgtgacgatgttttttgcagcgaattaaccgccactgtgattggagagatgacatagaagtcgattaggaatctccccctaaattagtatcggcctgcaatagccatttttttacagactttgaaaatcttaatatgatggaagttgtagatatctgaaaggtttagaataactagagtggcgggtagagatattttgttgctcgatattgttgtttccttccaacacccagactttagtcggctttatatcatcacatgagttgattaaagaattgtttcaggtaactttcctggttgctttacccactgaaacatgaaatgaagtgttttttgttgataacttgacattgatgattaaacaattgtttcaggtaattttcttggttgctttaccatgaaaaaggtgattgttgccatttctaatgcgttatgcatcgtttgcaggaaaaatataaagataactatgtacataaagcatctaaatcataatgggctagaaaattccagttgcgttcataaaatatgataaatcgtatcaaccttagtagagtccatgctggggtttgacttgatcaccattaaacaagaaactcgtatgaaaaaaatttaagaaattgtttctgcaactaaactagtatccaacatatcaagtccaataaaagataaactgcaaaatattaatgtccacttctgtatgtccaactattttatcatatttgttcactgataattgtccagtatcgtcgaatgtttaaactgttatattgattatgtttgatgtaaagggatgtaaattatatctttcatgtttttgaccttatttccttcttggactttttagacaaacccaaaaaatataaaaaagtaaaccatgatttatattggttagtgatgttgatgcttctaaccatgttagtaaaaaatataaaaaagaggattccaaataattttgtcttctatcatattgatgcttctcccaaaatgttcagctctacttgcacctctgtgagtgtataatgcaaacaatgaattgaagattttttttgattatttaaaattttttccacaatgttttatggtttttggtttgttttcttttttgtttactgatttttaacttttcattatactgattgttttctatatatccacaatattatgtccacaatataatgtccaataagtcaaaaaaaaaaacatgtacaattgatgagtgtttcatacttgtgtattgttgagtgtccaatatgatcaatcaattagttaaccggttttggatatgttcacaacaaaggagaagactcctccagttttggttacaagcgaggttggccttctgtactatctaagtgcacttagagaaaacagaggtcttaatttgtttgtgaagtttgaagaaatggaggaagatttacaaagttttgatacacgaggagatagtagcactaaacgaccgcgtcaaagcaatttggaggaagagtgtggttcaaaaacgcctaaaagtggtgtcacagctgttcgcgatatatcgtctgtgggttcaaaaactcctacaattgtgttgactcctcgtgatgacgaattcatggaggaattggaacaagcagaagcaaacataggaagtaacagtgggcataaatcgtcacggaatgatactgataacgaaggttttaacaatgatgttgaaaagttgtttttcgttgataacgatacagaggaagttgaagcagtcacggaaaaacctgaagatagtatgccctgtggcggttatgataaggagttttggtcaaatttcctaacagatgattatggtggctccaatgctaatgagttgatggcaacaggaggtttagatgtaaggtacgggtctaacaataaggttgtgggctccaatccggatgaagtggttttctgtactggcagcggagtctttgatcacgctatatatgtgaatggggctggcgaaagtataaagatagagcatacaaaaaagaccccacaagttatgaaaggaaagatggtcggtggagttggaagctctcagggaacgaggaatgaggtcaaaaagttggaggaagtggatgacgaagagtttgacatcccacctttgtttgaggacatcgagtatgaaattgataacttacctgatttggacattgatgatgatggtaaaggtatataccagggaaaagtgtatgcgagcaaagaagattgccaaataggattggctatatttgcgataaagaatcagtttcatttcaagcaaacgagaacaaaatggaattgctcagatgagaaatgtgattggagaatattggcaactgtaatgaatggcacaagttactatgaaattaagaaagcgcagcttcaacacacatgttcagttgagactagaaggcagtacatgaagagagcaacgtcaaaggtgattgcatctgtatttaaggcaaaatacagtgaagcttctgctggtcctgttccgatggatcttcagcaacttgtactagaagatttgagggtttctgcgtcatacaaaaagtgttggagagctagggaatcagctttaatagatgttggcgggagtgatgaagagtcttatagcaatttggctgaatatttgcatcttctgaagttaacaaatccagggacgataacacatatagaaaccgaacctgatattgaagatgaaaggaaagagaggtttttatatatgtttttagcttttggggcttcaatacaagtttttaagcatctgagaagggttttggttgtggatggaacacatttgaaaggaaaatacaagggggttttactcacagcaagtggtcaagatgcaaacttccaagtgtatccactcgcatttgctgtggtggatagcgagaacgatgatgaatggacttggttctttacaaagttggagaggataatagctgacatcaacacactcactatattatcagataggcacgaatcgataaaggtaggggtgaagaaggtatttccgcaagcacatcatggtgcatgtattattcacctatgtaggaatatacaagcaaggttcaagaacagaggattgacgcagttagtgaaaaacgctggatatgagtttacgagtggaaagtttaaaacgctttataatcagattaatgccattaaccccctttgcataaagtatctacacgacgtagggatggctcattggacaaggctatatttccctggccagcgtttcaatctgatgactagcaatattgctgaaacgttaaacaaggcgttgttcaaggggagatcgtcacatattgtggaattgctaagatttattaggtctatgatgacatgttggttcaacgcgcgtcggaagaagtcacaagcacattcaggtccagtacctccggaggttgacaagcaaatttcaaataacttgacaacatcaagtggaagcaaggttgggagggtaaccagctggagctacgaggtagttgggaagctaggtggtagcaattttgttgatctagaaaagaagcagtgcacctgcaagagatatgataaactgaagataccatgtggtcatgctttggtggctgccaatagcattaacctctcgtacaaggctttagttgatgattatttcaaaccacactcatgggttgcgagttacaaaggagcagtattccctgaagcaaatggcaaagaagaagacatacccgaagagctcccacaccgttccatgcttccaccatatactcggagaccatcagggaggcctaaggtagcaagcataccatcaacaggggaatataaggttagataaatattttgtaaatctcgtacattgtctaagcttttgaaaaactaaccaaactaatgcaacatgttggttaacatggtaaacgtagaaacctaagacaggaaggacgcagcagaacaggtgctcacgctgcaaaggattgggtcataacaggacaagttgttctaatccaatttgagaaattgtgttttcgaattttagttgttattatatgtgtgatctttaactagttgctatgtttttgtaaaatatttcagttctttttgtaaaactagttgctatgttttttgtaaaatatttcagttcttataattagttattgctgaaacatatcctgatggtatcgcaaacctctgcaataccgtttacttatccataaagacgtatccatatggagatgtttttttaagaggtaaagtagttctaatccattttgagtacttgtagttttttttttttagattgggtcattacaggacaagttgatgtaatccaatgagaaattgtatttttgaatttaagttgttaataaatgtatgaactttaactagttgccatgtttttgtaaaatatttcagttcttattgtaagacattcccataaatgtttttccgtttctgtaaacctagttcttgatgtaccaaatataagtatttatgtttatttattgtgttaaaatagtctataattagcatatcttgctaaaccgcaaatctgtgcaatcccgtttaactatccataaactcttatccatatggagatgatgttttaacaggaaaagtagttataatccattttgagtaattgtagttgtttttttagattattttttgtatagtcattagtatatgtaatgattaaaggtatttttgttgatttgaatcaaagtaaagcttgattgcgccaattattaatatattttatgatacaaatctctattcaacgtaattgtatacagatagaactatccaattttttattatcttttggctactatgtaagagaaggagttgtatcagaaactggtaaaataggatttactaacatgtgaataattacaaggggtcttaattacgtgtgattagactcggattcgaattagtagagattacgaaaaaccaaacacattagactaaacgaaagataaacgtgaaagatgaaaacataataaagctggaacaggatgtgtatcttactaaactaggaaagcagaaggatgtctcggaagaggtagaagtagaggcattgtgaacatctttctccgttaaattcattgttaagctcatgtattagccagcagtcaggatattcctcgtaaagaaaggtctcggcgtaagatccgaaacatttaggttccgaagcagaaatgtggccgataagcttgtttgccatcaaggatacatcaaagaaacacttgttctcgcgattgaaactattgaaatcatcaatgacttcgatacctgcggaacggtttagagcaatgttgagtagtttggctaaaggaaatctatctttacaggtactcaaaattgaaatggctccacacaggtcgaggcagcgaaatccgagactcaagctatggagatacaatgcgtaggggttccttttttctagacaattggagtagaaagagaaataaagagagttagaggaagacatgtagatgaagtgtgggcttttgtctagacgcactcgggttagcgtttcgtcagagaaagctgctaatttcccaacctgaccagctttaatccaatttttcaaagcgtctattccttgttccgaaacgtagctaacgattagagcaagtattggttccggaatatataacctggaattcttcattttctgctaaaagggtcgatgataagttagaggaatgattaatttaaggaataagtaaaggaaacatatttgtttgtttagttgcgaactaaaacctgttttgcagtgtgtccacgatttggtacaacaacgatggcagcggaaggtggatggatgtattactgaggaggaagatctggatcggcggggtggggagaatctctaatgtttgtattgagcagaacgggttataaagggagaaaggaaatgaaagtttctataaaatatttatattcgagagggataaagcttagtggggagaatgggtgcagttataaaattagttccataaaatgttggagacgaggtaacggtcgaagacttgttctctttataattgtgaaaaatagtggacaagtactacttaatttaatttaatatcgtcacatatgaaaaaaccgataggtaacttcacatataataacttcatatataaattctcataaaaaaaaacatagattcttaagtttgccgcaaatgtgaacaacaaaaagaagaactgaactgaaatttacttatgaaataagggctacttcttgggagaggtaaaagtaaatacatgtgttacacctctgtccctcatactcattgaggttctgatggtccgaccaacactcaccgtaatcctcaaactcctaggaatttttgtatgtcccttggcgacgtggaccaacctcgttgatatggaacattagcttatctgcgaataagtcgacttcactaaatttgtagtaccttcgcttgtacatcctataaaattcccacgggattgatccagcgcaactatggagcatgatgtaaagtagaccagcatgtgggaacacgtctttaataccatccaaaatagcaattgcttcctggagctcacacatatgaaacgccaacataaaataccaagatctgtcaaggcggacacaacttagtgtttccttggaatagactgccgctttaaataacagaccagccttaacaaaggatttcaaagaatcaacaccagattctgcaacgtagctaacaattttagcaagcatcggggccagcaagtaaacttctgggatagcagcaactgttgaaaataacgaaagagattgttagtatttttattaaagttgtagttaaaattgtagaatactaagtactttaggtttggacgaacaaccattttaacatctgaggcagatgatgtttcattgttgcttatcttcgtaaacttctgcataatttctctgttatttggttttaactgaagaaatgggtaatgggaaaaacattaatgaatgttgggtgtttatatagattattaaggaaagagtagtttaagtttttctgcggttatattaaacaagttataatcggtggtaaattgtcccgctataaatcagtttctcaatgttgaggagggaactaaaatcagatgcggaaaaaagtaagagaatacatcgtttataattagggtataaaagacaagaaagtaatttattaacctatccataaacaacaatccacgatagtaattgcttatggatttcaactaaaagtttcaacaatccaccctatcagtcatgtaaacaagtatatgttgagaaattagatatgttgggaaacaatattttcagatcaccaattatattccttttaaaactcaagcaatttgctaatttctgataaaaagattgtaatcttgatataaccgatcgttagtaaggtgcacttaatttatacaccttattactactgtactatttaataaaatatttgttacaattattacatatgagaaattttgaacaaagaaataactttttttattaatatatcttatcatttataaaaatattacaactttgaaaaaaaataaaagaagatgagatagttctaatcatcttctattagtcgacaaccattttgatttcttcaacttcctcaacatcaggttctggatacatggttgatataggtgcatagttaacaatcttaaaccagttacaacctggataaaatctaagaatcttccaccaagcaagagcaataacaacattattcttgcgaaatgctcgaaatcttttctccaagtccactgcaatttctccataagcctcacataccaatgtatccttgctgaaaatatgtaaaaatatgagattatatacttactataaaaatgtataaacatgatatgtttgaaaaaaactgtaaattgaggttttaagaaatgtactttttatccatgatcgtgaacggcaatttgaatccggccatatcattctcgttacttgcggtattagtcagaatcccaacattaacgagtgccccgataagatctataagagatatgttggagatatctttttaaaaaagtaatgttttgaaaaaagtgaatgaagtttataaagaagctattacttaccaaccaaggtatcgttgccaacaacatcatccacaatgtagtcaaatggagtgaacttgttgagtaaaccggtttctcttggtgtggaagaagtgacaatggtgtgatccatgaatagaatgcgaaactgatgaggagttgtttttattgcttcgcagttaggtcgaacgagaaacgtagttattgttttccattgattctctttgatcctgtcaaagtagaaggcagagaaacgaggaccgattgttgcttctatttgagtgccctgtgaaaacaacattttaggggtaagggatacactgaaaaaaagaaaaattctgcaaattgcaaaacaaattaaggaaaattgtttacccattcatcggccaaaacaagacgtagttcgaaagcgttcaggttaagaaattttttgtaaatcctcaaaaccatgacacagatcgtccaaccagtaaccatcggagacaactcgtacaagtggtgatgtttaaccatcgtgaaaaggagaagtgaagagtaacgaaaaacagagaattatggaaacgaaaatagaggatagtgtttttcttttgcgattgggttgtcttggtagagtcaagtataggagaggtatttatagcaagtgaaagtgttcctctgattgaagccaaaacggtgtaagttcgtctgcgaggaaaagatgtaacttttaacatccaagggatgcttacttgaacgatccgttgtcgttatgctctatgacatatttatttgagaatattaagtattgagttggtggtgcttgtaatattagatatataattcgtctgctgtggtttatagtcgagttatttatctgtaattgttatgctaaatatatgttctgtccaggagaacaagtccaaagagaaatgtccgtttgaaatttattataacgaggtgaccaaacgtatatgaccttagaggattatcaattggaattcatttatgctgaacgaacaaatttgatgggatttgacttttcataggattaaatagtgtataaatgatgtattttaacaaaaacaaaagcagaacatcagaaatgaaaaaggaaccacattgtctttcaaagtttgggactatctgttccattctttgatttgtatcattcatgctctccatacagctccgcccatagggtagatctatagcattcggcagcaaaattctcatatgctattggtttgtacattacagctttcaaagcatgtagatttttggcttcaagacattttgtgaagaaatgataataaatggaatgcggcatggaccaccacatgaaataacgagatttgtctatgcggacacaactcagtgtttccttggaatacactgcagccttaaatgctggaccagccataaccaagggtttcaaagcatccacgccatctttggcaacgtagctaacaattttagcaagtattggtgacgggatgaaaatttcaggaaaaacagcaacctgagataaaaaaaaacaaacatatgcagactataagtttttgtttacaatgaatataaaacatagaaaactaagtagttttgtttatgttgaacaacctttttgacactagatggtatttcattcttgttgtcttttgctaacttgagcataatttctttgttttcaagttgaaacggatggaatggggaatggaagaaacttaaacaaatcgtgagtgtttagtaactgtatataattatgctcaacactggataattatctataataaacaattataattaaaactaaaaaaaataaaactaaaaaaaaaaggataatgctctaactataattgtgctctaatcataatgtccccggatttgtctcgaaccataataatcccagttttaaacctgattgtggaaatattcccgctatacaacagtatctcaatatttcccgtagaaggaattttagatttgtctttcatggtgaaagagaaagataattgttaatatatccatatgaatccatccacaacataactgtattaattcgtttgtctgattgaataattcactatgacttttagacatttatattaagttttaacgtatttgtaaacataattagctcgaatgatttataaaagcaacaatagttcaaaatactcaaaattatttatttctcttgaaaaaatggggttatggatggaacaaacaaataatatgatacaaaccactacaacattcaacagcaatatagagataagattattttgtgggaatggggaatggaagaaacttaaaaaaatcgtgggtctttagtaactgtatataattatacctaacactggagagctaaccataattatcttctcataataaacgtgataattaaaaaaaaaaaaaaagaataatgctctaactataattgtgctctaaccataatgtccccgaattatgctcgaaccataataatcccagttttaaacctgatggtgggaatattcccgctatacaacagtatctcaatatttccggtagaaggaattttagatttgtcattcatggtaaaagagaaagataattgttaatgtatccataagaatccatccacaatataactgtattaattcggttgtctgattggataattcattatcactggatgacatttatattaagtgttaacgtatttgtaaacataattagctcgaatgatttaccaaatcaacaatagttcaaaatacgcaaaattatttatttttcttcgcattgtgaactgatatcaaatgttagatgcacttgaaaaaaatggggttatggatggaacaaacaaataatatgatacaaacccctaaaacattcaacatcaatatagagataagattatcgatatggttaagaaaaacaaaaaacatatttatagaatccagagttataagcattcaaagaagggggaatcaacatttatattacaacagatttgtagggtggcattccataactagtcagaaacattagatgaatagagtgggcagacacattgtttatatatgtccatggcatattgacgcctaaacgcgtcgacgtgtttgtcagtaatttcagccattttatctgggagtttatcacttgcctggatctcgaggaacttcatggcaaccgggccacagtcaccactccgcaaattcttgtagataccatcaattcgactccagccaaacggttgaagaccgtgattctgagaaaactctggcgtacagtacctttggatgaggtggggcaaaagattgactactggctcaatgcatctttttaccttagcgtcgtcgtagaggtctgatttgggtcaagaatttcaacgctccatatgccaagattgattgaaagaccaacccagtggcaatcattccatatcatgggtgcgtaaattgtatctatgtccttgaaccattcagttttggatcctttgatgaagcgctgcatgtcctctgaccaacgaacacgtgatttcaccttcgcagcgttgaaggctctgaatttagcttgtagatggcttgtgaaccatggatcaacaaaagcagaacgatgattctcaagtgtagttgtgagcctccgagaaagtaatgacaccaaaacctccatgtgctaggaaataaaacatttacacattagtatctcttgttaacaggttaatttgtactaaggtaaatatagtggactacataccagggttgaaacccattgctgaggtttggcaagtttgacgaagaatttgttggaaataaggaatccacacttggttagatgttcactatgaggtaaaaaaacagcattagtgaagaacttgatgataaatgttgtggaaataggaaaaatgaatgataaccatacatatttggagagctcgagagggttttgacaaactgtgaatactctgctttttttagtgttggtaaaagggcttgtgtctcaagtattggttgcgatatgaactcggctacgagacgtgcttcagcttgggagagatttggtttttctcttttatgcgccggggatgaatcagataactcaaaatattgatctggttcctgggcaagtgagttagagtgttctgagttattatcctgtacaggaagataatatatcagaccaatagggacaagctgttacaaaactgaaaaatcattccctagtcattattaacaaaagtcagtatatgttacgcaatacctcgttccttgtacccacaatattgggactatgtgtgggagatgattggggctctttgtcatctttggaacttgtatcaaatacaggcttcccaaacacaaccattgcctggaataagaagataattttaaaaacaatccaaacagagctgtccattaaaacataccagaaaattatgatacatgttataccttcataggatcagtgttgtctttacaaactcctgaatgaattgctgcagccgtctccatggtgacctgaatgtttagggttcacaaagagatggtgagaaaaacataagaatatataacctgcaaattatctcgaatccacaaactccaatccaatataaaagtgaacatgcaagcctaatttagtttagacataaggatgaccttctttttggagaacattgcaaacccagacaatgaatgagctgctggaggcgtctccatggtgtcctgaaagttgaagtacacaaaaagatggtgagaaaaacataagataatattatctgcaaatgttaaggtatacacaaaatcatgtcgattataaaagtgaacatgggagcatttttctataaatgtttgttgcataatgcttgagagatgcatcaaacctctacaatctccaataaatcaaagaatgtaaatcattagctgaaactagttagaaatgtatacctccataggatcattgccaatcttttcttcgggttgagcctccgacactgaatgcgatgatgcagacatctccaaagtaacctgattgttgatgtagacatgtagctagttagaataaataaaagaaattttgcctacattttatgaagtaacaagaaaatcatgtccaattacacaagaaccacaacacataaaacttgatgatgattgttacagtataccttcatagaatcactgtcgatgttgacttctggttgagtctctagcaatgaatgagatgctgcattgccctgttgagaattggcctataaatgttgttttggaaaagatctgatagaagaagcatccctctccagtgtcaaataaagcaaggaactagttaaaaatgtatacctccatagggtcatcgggttgcggtagttccactgagtgagatattgcagctgactccaaagtgacctgaatgttgaagtacactagtaagtatccacaaaatcatgtccacaataactatgcacaagtgccattatttatattaaggacaaaatccaatgtgttaaatcaaattatgtattagcctacctccgtcatatgatcatcgtcaatgttttcttcgggttgcgtctccaacactgaatgaaaagtttcaaccgtctccaaggtttcctgaattatgaattacagaggaagaagaagtaaggactgtgaaattaatttggtttaaggagtgggatgcagaaaccctctccgatgtgttccaacaaattatttattagcttacccccctcataggatcatcggcaattttaacttcgggttgcgtctcgaacactgaaagagaagcttcaaccgtctccaaggtgtcctgcatgatgaattacaaacagatatgtcttaagggctgtgacaataatttggtttaataaagttctgacaataatttggtttatatataagcttacctccataatattgtcttgctcgagaggagattgttttttttggcttaggtttgcacttgaatcaaactgattgtaaagtacagtagtcaattgtgtcagaatctctaacctgtaaaataaagtgtttgatgtgttgtgtttgtatttttgtacctggatttttccctcatcatctgcttcatggccatttggatcttttagaatgtactgagatgctgcattgccctgtggagaattaccgtctggagaattggcctgtaaatgtttttttggacaagaactgagtgatgaagcatccctcaccggtgtccaataaatcaaggaactagttgaaaatgtatacctccatagggtcatcgggttgcggctccaccactgattgagatgcttcatccgcctccaaattgacctgaatgttgaagtacactcgtaagtatccacaaaatcctgtccataataactaagcagatgtgcaattattatgtttacggtctgtgatgcaccaaccatttccgatgtgttgcaccaaatgatgtattaacttacctccataatattgttttcctcgagaggtgattgttttttgttgcttacgtttgcacttgaatcaaactgattgtaaagtagaatagtcaaatgtgtcagatcctataaactgttaaataaagtgtatgatgtgttgtgtttgtatttataaaagtacctggatttttccctcatcatctggttcattgtcatttggatctttggcaccagtgtcataaattggattgtcctctgttgcatcatccttataagaatcctgtgattcatgtggagtatgattgacatccatggggtcatcagtaatcacctgaaacaaaatattttgacgtaatcaattctaccaaagagatattggaaattaaatattacactaaccgtgtttgtcaaagttgttctatcaatggattcatcttgaaacttcttgaattcatcatcgtggactatcatagaagggtgggaaagaggaggagaaacatcccatgaatcatccttttgctcagatagatgctagcaagagtgataaaaattgattaagtacatatagatgtggtaacagaataaacaataaacacataaggttaaaacagcagacctcaatatcaaaatcctcattctgttcatcagacatcgtgtgtgaatgagatggattctatgaggaaaataaaagttttgttatgcgttaaaacttgaaaaatgtataagtagatgataaagttcaaatattataaactgtttgaaatcttgattacctcagaggcttgagattgagtaggtacctccaatgacttcttgcgctttgaactagaaacaaatggaacaaaactgaaagccggttttctggaccgcttgaatctgacagtttttcttttcttttcaagcttcattacacgatttgatagctcttccatcttgttttgtagatcaacgagcaacctagacttctcatcatcagatagccttacattttgattaaaacgagttgaatacctatgcttggatttgggagggtcagacttcacccgtagtctcttcttacgatccacaatatgctttttgtgaacaacagaagacttcttctttgggattttaattgatggcaatgtagtatcacctcctggccaatcactttttttgaattgatgagctgtcagtatcaaaccattcatgtaagaaactttcctgtctttcagctcgtcatcccactctgcccaactttggtcaacattaatatcttcacctataagcggatccacaggtctctgttgaaaaatagaatgttattattagttaataagactggatatatagaaagagaatattatagagactatataaaaacttttgggttagaaaaaaaccttaaggttgctttctaaagagtgaatctgatgaagagtaattagttatgttggatgagttaaattcttccaatgaaggattgtcaaggaggtgtcgtcaaacttcagcaaatccaccattccaggtatgtttcgaaatgctaagagctgcagggcatgcgggaaacctttaagacggaatgtgatctgctggagttgcttcaccaaattctgaataggatcgtttgtgagctgtcttttaccggtgctcttagcgagaatccgtttctcgggtgtcatcgcttcaaccgtcttcataaacgactctctaccccaaggaaacgaaaggaatttctctaaatctgccaacatctctacatatttaaatgtaggcctaccggtttggttagatgctatgaggacaccatctacaatgagtaggaaagcgagcttcagtttgtggtcagaagacagtttactgggtttcttggttagcatggcagatatatcccctaatgtaaccgtattgtttggaccaattaactcattccagtagctcttcttgccatcatcataaaccggagaattttcagggtcatactcgtcaggaaactccccacaaggcaagccagtcacggaagcaaattctagtagtgaaaatctcattgggtgtccaccaaaaactgtccaaaactcatactttttcttagtaagcaactgtctacataacaaggcatgaatgaccttacccgaagtcgcaaccctactaactggcaaatggaataaaggaccaaagcaagactgaagtataaaatctaattcctctgtcccatcaaaaaccttcttgataaaggatagaatatctggtctagagtatacgttcagccttcccctcggataatgatcggtggcgaagagtctatttggaaagtttgaatcccactgagaagatggttcctgagatgtcgaccttgttcattggcaagaaaccagttcaagagataacgattagattaacgagtatttgtacaaactactaaaaccacaaacgtctgtgcttagctacaaacaattgggaaacctttttcgattcaaaaaaaaattgtagaaacattcagcgagaagaggatttcttcttctcagttaattggaccaaaataagatgattggaaacgatttgtaccttccattgagtattccgatcagtgagaatcaactggaatgctaatgaaatctggcttacgagaacaataaatcgaaatcgaattcgattattgcagagatttgggggaaatgactatttggtttttattcaaagagtatagagttgcctgagtggcagattgatggacagcgacggaggagtcgccggattcggagcagtcgccggattcgctggagtcgcgatgtggagaaacagtaaattaggttttttactgggtaagcgtttttttacgatcgtggttggaatatggagttaacccagacggttgataagacgtggttcaaccggaaccagtttaaagaaaaccggctatatttgttaggttttgtttaaccaacgatttcagggtaaaggggtaattccgtttgattaaagtgactaatgcttttaaagtgcctatttgtggccaaagtttcaaaatagtgcctctacgtgtaatattctctaatattatttacatgtattatatcatttaagaacatgttaatttattaaataatatatatacataaataatttggtgctatactgaaatctctaaaagattttttttttgtttaacaacaaatcagttatattatatcacaaaagtgttacataatacatgaaatcattcgaacacaaccatctaacgattttacgattttggcgagaaaatatgattttacggttttggcgggaaaatatgattttgcggttttggcgggaaaatatgatttttgcggctttggcggaaaatatgattttgcgattttggcgggaaaaacaaattataattttgacgtaaaatgatagtctgtgatttcacaatttttagagtttttttagtacaataggtaattttaaaaaatatattaaataagaaatctatcgaaaattaacattattaaaagagggtatatttgtcatttgtttttggactaaatcatctccatccaaatgattctaccaagtccatccaaatgaatttcacaaattagcctaaatttacaaagtcattcagatggaccatccaaatggttcatccaaatgatctgttaatttatcaaaaacaaacatcatttttcatctccatccaaataatccatctggataaagaaacaaacagaacctaactacaatatttagaataatttcgatgaataaatggagtgatcttacttttccaatgaaaatcgtacatgcaacaaataaaatatattaagtttccttttcatatagtttccttttaaaaaataaattatataggacttctcctccacaatgtaacataaagaaataatcataggatatgtaaaaattgtttatcacataataattattatgaaaaaggaagaaacgtagattgtaataatttaatccatattaaatcaaaaggacataatttctaatataagtatatatacaaatactccaataagcatccaaaaatatagagcatgaaagtattgtataacagccacggttgtttatcgtactcgattttttttttatcgtcaacttaactttccattaataaaattacgagacattgtactctataatcctaggagaatattgttgataaaatataatttcagactcctgtcgatatttataatttaaaaacataagattccttttatcatgtgttaccatgtgttgagattgggttatagagccgcccttctacaaggcagaagaaactcttgctttaggccattaattaattactgaactaggaaacgtacaagaaaaaaataagaaactaactttagcaccaataaagatcatttcaatagtttcaatgtttcactaacattaactttagcaccaataaagatcatttcaatagtttcactaacattagtatactgtagtattgtttccaaagtcttatgattttataactttatttttacatgttcctaaaagatttcaaatcaaaaacactgttaaaacttaaaagagtgggtttgcaatttaaaaaaatatatatattcgaagctcttagaaaattgaagatttgaggctttagctgttaattcaacaaatgttcattggactttttttgaaaacaattttatctgaaattgtaatactttcaataataattaacacgacaagttaaataactctacgtaaacatttgttttctataattaacactatatctcacgtagaaaaaaatgtttacgtagagttttttttttttttttttttttaacacgatgtttacgtagagttatttaaattttcgtgtgttaattattactgaagtagaacaatttttgtttatatattaatatggatgtttatgacgataatcaaattcagattattagttgcataattattgacagaaaagtgttaaatgctttgccaaaaaaaaaaaaaatgttagatgctgcaatttgtaaagataagtatccctttagtgcatattttatcttaattttaatttccttataaataacaccaatggccaagattagttattattactaacattagtacaattttcgtttatattaatatttttacatataatttgtttttcaattaatatataaaggatatatattggatttggggaaacatcctaaacttttcattggtgaagaaacttaaaaaaaaaaatcactacattaagaaaaagaaataaaaataagaggagtcttgttttgtacatagcataaccaataaagttaccagaaccgatctttattgacactaagataaccggacatgactttcccaccagtattcctcataccatcgatgaggaaacaccaagtggaacccaaagctccaacgaaaaaatcagcttctgacgccattaagaagttaacaagaggatagttcgtgcttgtctctctcccaaggctagcttcatactcagcaatcgacttattaccaacttgtctcgccacttccgtgtaatagaatctccaatgatcataatctttacttttgtccacaacttccttcatctctgtagacaaccagatcttgttaagctccggaaatcgatctttgatccgatcagctaaatgcatgtactcttctaaagccgcgactctcatctcacacgctttgtctcccatccgtacgtgcacacttagcattggccttggaacccacggcttgtggttcgaccatacttgttcctcaatctctgtcttaacctttttcttcttgttctttctccaatctcccgctgaaagaacaatctcggcagcttcttttccaaacgcggtgtttcgagcagcgttcattaaaccgcaagtgtatgcagtttgaaatctcatcaagtatctcactgcttgtgctctccaccatcttcgatccatttttcggtgtttagagattaaacttccgttgatttctgtagtaggcttcatataactccaaggcttaccccatagttttggtataggtccagcccatatcacctttgagctgtagttttgtttccctgtaacagtaccactctcccatgcttctttctcccttacaaccgcaaacgcgcgtttccgacactcttccgacgtttcaggtagaaaatagcatgaccatcttccacgagaagaacctgaaaaaccaaacaaattaaattccaagaatttagttctttttcacgggaaagtataaacaatgagacttatccgcctacaacaatgttttactcgctctcttttaatttatttgtagtttaagaaaaaaaactttctgttgctaaaatattgttttcaaattaaatatatttaatagttttgaccaagttatatctaatataccgtatattttttaattggttgaattagttgtaactaataacatttttaggtaaaagaagtaaattaaatgagattttttatgattttttaatttatgtgtaaaaaccttaaaacgacaaataaatattgaaataaaggagtattaaaaataattacgaagacggaaaataacatgctaggtaatgtgttagctgagtaaggcatattgaaaagaacaaaacattgtatacctctgcaaccatcatgatctgctcggttataatgatttgcaacaagcactcggttttcgtttatagcgattgcgagaagaccagtcatttcagtgatctgagctccggatccataaataggaagtgtttcccaatcaactacaaggaacttgacagtttcgttttcgcagtccaaaggatgttgatgaatccatatctcactttgtactatcctagttaacggatagttctgttcgtctcctccagtgatctgaaacaagcttggtttttaatagtcatcatagttattgtttgatgacaaagaagaataagaagcatacccaagtaggaaacgactggttcgctatccgtgtatctaaacgctccctaactcgtgatatcacctcacaattctccaaatgtggagcgtttggtacatcggatttgttcatccctagtttcttcaagaagtcttcattgtttagtactaaattgtcccaagcagagaccaaaagttttacttgatcatcattatctcctttctcagctttgttcgtccatttcaatttccggtccatgcttgaaaccatatctatatatcaacaattttcattacactaaaaataaaacacaacaagttacaaaaatgctaaatcttttgagacttacggataatgtgagaagtggaattgtaaggaagaaaagcagaggaggaggcagataaagagaaggctgcgagctcgaaggtgccaagggaagtaagagctgctaagaagagtgaagtgaaacagattccacatagaatcccaactacacagatttgacatggaaatgaatttccaagttttaatgctttctctgaaaccattctgttcaatgacttcatgctcatactaatctattgtctaactaagaacgaaacccacttgttggtacataaacatatgaaacggatagtgtacataactatggagatattaaatgagaggaatacattaaggttgatcatttctaaacgcaaatattttaaaacatgttgtaaaagaaaaatattaccaaagaaaaaaaactgtagaaaatctatttaagtttttgaaaaatgtgaatttcaaatttaaaatgacacttgcatcataaagaaagatagaacaacaaaaagcctgtttaccagcttgtgtgaaattatggcagagaatcaaaacacaaatccactcgacattgtttacgtataaatttgtttaaattactaatcaaagtaattaattgaagaaaccaagaatataatattaatttatgttttatggaaagggagagaaaagagaaaaagcattgagaggttaacctcgaatctcggtttcttaggacaaataagtgatttaagtaagactaagactttgatgtgagcgaggttgtgtgtttgttttctgttaaaaaagtaatattatcatcacgtggtttattactaaactatatcaagtcgcttctactttttcaaacacgccaaacgaattgtaaataatggctacactagatacaaaaatttgaagtatattaattgataagttgtaacacctcaaatttaaagaaaatataatcaatttaaggttaaattaattaatttaaaactatttgatttcgaaggaatttctgatcatttcaaaagtttgacgcaaaatcgtaaatagagaagttcagagagtaaagtgcaaaaatgatcctacttaattctgaagttaaaggaatagtttttggaattttaatctccatctaaagatttgaaagccgattctctcaacaaatagaggttttagtgagttttcgagacctttcatatcatctcgaatttgagtatttttgggcaatttgtgaccggattttgttatgacttaggttgatcgtgcttctccatattactgtcttcattctggtttatgttctgcttcggtagaagagtttggtaagccttatcttcttccttcttcaatttttctcatagaagtgatgttcaacctctttagtgggggatttctttccaggaagaattaaaacttaatatataccttgttaatatctcttcaatatgaatcaactgccgctgagatctcatcaaacggaaatcggaattgatggaaatctgattgataaatattgattttgttgatttatggtcaaatctgaatttatatacaccggttcctaaagttttgaattacagttttgggatggccattctatgtaatactcgcttgaaattaaattttaaatttgttgagttttaatttttaactgaatagtaatttggatcggttcagcttcttttagaccggtttagtaaactctgatacatgaatacgattgcacttgaatttagctttcggatgatatattgtacgtatttttctgatttgtgttgaatttaggtgaattaattagtgatttgggacatgtgtagaattgccgttaacactcgttaggtctgaaattttttcccaggttagttcaaactcccttttagatattatatagttgtaaaatatttcaggagtgagaaaataaataaattaaattagttgaatgataagttgaaaaataataatttgtttgtttgtttagataattaatatgaatataatttttggtaataagatttgttattctgtttagaaataaaatattatattctgttactaccggtatcagcatgcaattctgatttagctagctctgttgagcaatctgtgacggccgacatcgccaacagctatattttatgttagtctgtaagtggtattgaggtcggttattgatgtgtatcgtacttccttatcacctcgttaggaaccaacatccttatcggttatattatgtatatattctgttagtaaatagtttggatcgaccaaatctggagtagtaccatttcaacattgcattgatggatacctggtcaatctattccgatgttattattttgttctgctgatattattttgttccgatgatttgatcatgtattttgatagtataagttttgatgtgtttattttttttacaattaattgaaatttatgtctcttagtaccaacacgtgaatattaccatgtgctgggatcaacctatgttggcacttgttcgtagggtttgtaatctcactcggcgatttttgctcacacaagttctgattccgtcagagggcattgacgaggagcattataaagctgagatttagaatttgtttttttggtcgtagagcgagttttgatagtttttccaaagtttgatttattttgtttttaagatttggagtttgatttaggctcgataaaatatttgatagattcacttcgatctggtattcgactcgattcagtttgaaaaaatcatatatccgtaaatttacaaagtaaatcaaatactaaaaatagaaatttgtcaaaagagaatcaaataacaaatactataattttcataggcagatattcgctccgctcaggaatacatacatatatatatatatatatatatatagataatttgatatctaaattacaatttttttttaatgtgttttataattttcttatcatttaaataatcatttgaactactagttctaacaattaaaggagatatatatatatatatagatgactgataaaatattaatattttcataaaagtttattattttggattaaattttaaattattgtattttttattttttaaaagtaaatatttaacggatctaatatccggcaaatagtttggattttaatggatgtttgaactgctaaataatcggtccctatcaaaacaaatacgactcgaaaaactaggggggttattggatcattgatttgtatggatttggaaattcaagtaacatttgtaaattcacacagaatccatttgttttaaaaatcaaacaacgtggatttgaaagtcaaataaagtggaatttaactcaaataaagcagatttgaaattcatacaaaaggattataaacattacaatctttaagaaataatctgtcacgttatgatctatgaattctcaattgaattgttccacatgtttgatgctattgtttctctccactgattggcatattctctctgttgatcttgggttgtaagaacttcatcattattgtcattaacttcttcgacaacttcttctgcactttcgtcttcttccagaaaattatccgtttgacaaaactttcgaagaaaattatgtaaaccaacacatgcaagtacaatctctgtctgcgtcttataaggaaaaggaggtgcagatttaaagattagaaatcgagatttaaaataccaaatattctttcaaccacgtttcttaaggatgcatgatgatggttaatcaactcttttgcatccgttggttgtgaattttgaccagaatattcttgtaggtgatatctgacaccacgatacggagctgaaaagtttcgacgatttggaaatccacaatctactacataaaactttccagaaatacagtaataatttcttataaaagatacaataatatatagcacttgtcttgttgaaaaaaacatatttacaatataaaaacatgtacttaccttctggaactggtagtcgattactgttccttgtcaaagcatcatttaatacttttgagtcatgagctgaaccttcccatccactaagcacatacatgaattcgacatcaaaattacaagcagccaacatattttgcgatatatcaccttttctgttacgaaaagaaggcatttttttttgtgataccattgcaaagatatgtgtatcatcaatagctccaacacaatcctaaataaacaaaaaatttatattccatgaaagataataaaaaagcaaagacataactttatgaaagatataccttaaaatacggataaagcctcgtactttctctaatttttctaggcactgcaatctcaggcttagccattaaacttggagcaatttgattaagagcccgcaaaactttgtgaaagttcacgcttgttgcaaacgttgacctattaaaagtgttttttgtataacaataccttgaattttggccaactactagaagaaaagttgcaaccatttcttcaacactaatatcttttgtatcgcataaacttgtctgctcctggagttgttcacataacttcaaaaaacgtttgcggatacattcgatacaactgtcgaaaatgcatagagttttgcttttgcgcattttctatatagatttctccgtctcttgtgatcgcacgacgaatagaatattgaagtccatgtcgtaggcatttcctcaaatacaacatccaaaaagaaatcaagagcaccaacaaaataatgtgagcatcccactcgtcatcatgtaatgcattattttctctttcttcaaggagttcttgatctctataatgggctcgttccatgtttgacgatgtacacctgtgaaacaaaaatataactcgtaaaacttttcttacaagcaaatgacatgataattaaaaaatcaagcaacaaaaaggtggagacgtgtattgaaatctcacaacaagaaagttgaaaaatataattaacatataaagttaagaaaatacacttacaaatttatcaatggtgcgccatctcttttcaagtctcttgtgttcttatagatttgtacttttattatatgtatattttacatttttattttatgtaaattttacgttttacaaacacacataataccttttcttttatgtacattttacattttcaaaatgacaactgtgagataaaagaacacataaatgctcgtagagaaagtgtatatacatatatatatatatatatattgtgagtcaataaattgtaagatttctaataagatatgataaatcaccattttcgtaagaacttttaggtgaacgaatttttttgtgagtcaaaaaattgtaagatttgtcaaatcagcatttttcgtaagaacattttacatggtagctttctaaagtggattcatagatacagctgtgatatattacaaaaaaatttgtgactcaagaaattgtaagattttcaaattttttaatcgaagatttgtcaaatcaccatttttcataagaacctttaggttaacgaaaagcctatattaactaactttttatactagtttttatgtagcattaataaaataacaatgagcaaatcacaacaagatcaagaaaaaaatgcataccttccatggagtccacaagaaaccagaactttgatagatttacttttagacggtcttgcttcgggttggcgtaattcaagtggtgtgttcagcaagtttacagtggaaagaaaaatactgcctattgttaatcgaaaacatgaggatgacaaaactcataaacactacctaaacagaatgaagaccttgaagagaaaatacgtaagtggtgttgaacttcttagttgcagcccgggtttggagggcatccaaacacaaaacggtttacagcatcagataaggtgtggaataattatataaaggtaagcttcacatacgtacattagctttttcttttagcttttttaatataattttaaatagtacgtggaaggttgcatcaataagataataaaaaaataaatattgaaatttgtaattatgctaaaatatatatttctttgaattttatgcgcatccaagttacaaaaaattcaagagatgaaacctttgaagaatttgatgatttcaagatgatatatgaggacaacatagcaaccggtgggaatgctattggattaggtgatgatacggatgctcgaacatgtgaaattgctggaaaaaagcaaacaagttctattgaatcttttttaatggatgtcgaggaagatcatgaaacacctttgccttttgtggacaacaatttaaggggcccttcagaaaaacttcctatgagaaagaagcgtaaaagcaatactaaccatgtaggtgaaccaaaaactcatagtgaagattcagaagaagtccataccgagatgaattcattgacaacagtaactcataaactcttcaatctaatacaagaaagagaaacaagacaataaagagaatctgaacaaagagaggctgagaagaagaaaaataacgtatgagaagctatcaaagaagttcttaatttggaaaacacagttcgttacgatgccgttaaactgattcaccgattgatgatcgttatggttggattgtgcgtaacgtgatggagtgctataataattatcttttgtttacaagtatcattggttttctataatttttcttctagtctcatatggttttcaaaagcttctctttgttttctagtattgttggtttttattatatgatggtgtttcatgatctttatattagcagttttttttcatgattgatatgcttgaaggttttattctatttgttgttcaaaacattgctatacaacaagcgaccatacattttttaaccggatgagattaaaatataataaaatattgttttcttccaaatcaacccaaataactaggtggaacccaaggatttcaatcactctatttataagtaaagcatatattcaattccattcaaatctaatatgaagtcaaatccatactcaaatcttcaatattgaataaggggtgattttaaaaattatttgtaaatcatataaccaatatcacataatttttataaaacatttaaaatcaatgattgaataacacatgattttacttggatttccaaatccattcaaatcaatgatctaacaactccccctaagtatttggatcacgtaaatcggatcacaaatatcactaaaatcccggatatccgctctgtgccaagtcctagttcctacgagattttaattttacactttataaaatttttagtattaaatttagtaaagcttcaaagattcttttgaattttcggggtgttacataagtgaaaactcaccgcattcaacactagagaaattatatatgtatatgattcaaagttgacgtaaacaatcataattactctaaatgaaaaaaccctcaaatctgattttcgatttttctggtgatgaaaaaatgataaaattgtcaggatttgctttataatatagaatgttggctttttttacaatacaaaaacacaaaaataaaaataaaaaagacacaaaatagaaaacccataagtaaaccataacattctcgcacgtaggtgcggatcaggatctagttacctatgtaagcaatattgctcagtattagcttatttgagtcaatctaataaaattgtaagaaaaaattacgattatttctgctttagttatacaaaaatcattctgatattatatcgtaatcggagatttcaagaattagtttattccataaccgttgtgacaagaacgcatgtcaggtttggcaaggagtgaacaatacttatgcataaacatatgatcatttaagttaatatattcttactgtcattacaaaatattgaacgaaatagtaaaaacttatataaagatctgtttaaaatttagataagttttagatttatagtttagtatgagtaaatccgaattgtatgtctatagacattgattttcttataaatcactttcacaaattttcaaattagtagcggtatgcatagatattttgtcatctcccatcgtgttatagattaatatatttgaataaggagtacaagcttaaatttgttgacaaaataatgacacagtacctgggtttttttttttaaataaggttcatgtcactatttgtatttgttgttccctaaatcattagttctttttttttaccgccctaaatcatctctacactattatttcagtaatgttgaaagaactttaacctatcgtgatgtgttatattacattacatgtcatcgtgatttcacataaacaaaaaaacaactagagggtcaaatacataatttgacaaatcaagacacgcggatcctctcctggagcagtggaccattcgacgtagagttgaaatctttatgatccaatcacccacccgagacctgtgttgtaataaggcttttactttcagtcttcggagtccaaccagataaacaagcccattgtggattaataaacatttaaacatttcagtagaggcaaaatatgttttattaggtaatcaagctacattttctgaacaaagaaatcaagtttatcttcacttcgactagaaaaagaggtatctatctagatttcttaaaatcttataaacaaccaaatcatatatctagattcaatatcataatttagcttcatgtatttagcctaataaacgaggtttctacattatatcttaaaacagtttcgattccatagattccagttatgcagatttgttttcagaatattcttaaattctatgacgattatacaagctactatttcctaaaatcttataaactaccaaatcagatatctatcttcattatcataaatcagcttgatgtacttggccatatacacgggatttatacattatatatcataacagttttgatttcatatcttcgagttatgcagatttggttccagaatattcttaaattctattttgattataccatttttctaacctaaacaatgtatgattgaaaactataaatactcacataacttacaaccctaaacacatcaccctactgcaattaaatagcaacaagttataaacaaaatgaatggtgcaatggctacgacttaccttgctgacctgaagcccttcaaaaccagctggcgtgtgcaagtgaaaatcctccatacctgaaaacaatacacagctcagtcaggagaaacactcgaaatggtactagctgatcagagggtacgttcaatctaaacattttttacaaattatgtgtcgagctgatttatagaatttcgttttctaatgttatataagaactttccagggatgcaagatccatgcaagtgtgaaaaaggcactggtgaaaaagtatgaaaggcacattgcccttgatcagtggagaatcattgagaacttctttttgggtcaagtcaggggacaattccgtgtgacaaatcatcagttcaaaatggcatttgttaacagtacatttgtttcaccatgtcctaccgtgactaatgatgcctacctgtcattaccaacgtttgaatccattattgttggtgaattgaatctattctatttggttggtgagtagtaacaaacgatattatttttgagtattttgatttctgtcatctatatgaagtgaacctaacacaacactacttattgcagatgtccttggccaagttgtcaatgttggcaaagttgaagacatagttgtcaacaacgaatcaaccaagaagctggaatttgagcttcgaaacgaaatgtatcattacttttttagaataatggtagtatatataaactatattgattaataattgtaaaatggtttgtgttttaaggaatgatcgcctgccatgcactttgtgggggaagtttgctgatcaggtaattcaggagtgtgagaactcaactggagagattgttgtgtgccttattaggtttgccaaaatcaataccttcagaggtaaaatcctaaaccgttattttaactctgaagttgctattactatgatagtgtacagattatctctgaaacgatttactttttgttttcgtttatgttaggggagaaccaaatcacaaatgcttttgatgcttcagttgttaccatcaatccagagttcccagaagtggaacatttcaaaaacaggtaatcaaatactatattgtaggtgttttgattgctaataaatcatggatattaagtttggggtttattggctgattggtaactacagtttgccaaaagatggtcttgctctcaccatttccgagactaatccaagacgtgaattgtcattcggaagtgatggttactttgaccagtatcccataaaatctatttcctgcttacttcatttcttagaggtagccatattgaataggaatgtatagagttttaatactgaaatcatatcctaatagttgtttgaaaaaattgagtatattttcaggttcaaaaatgcaaggtcatgtgcaagatacatactatagaaggtgattttgggtggttttatgttgcctgcaagaagtgcagcaagaaagttgagatgaacaataaggacaagaccgccattgccgataaaccaacaaagactacatactggtgtccaaaatgcaaccttaacatcacacaagtggttccaaggtataccatttcattcctttttatataattatattattgtatatgtagtctatgtggatcactcattaagatgatttcttttgctcctaggtttaagttgcatgttggagtcattgatcaaacaggagatatcaaatgtatcatgtttgatagtgctgcatcaaagatgattggtcattcagcttttgaccttcttgatggggtttatgatgatgatgtgagtaatgacaatggaaaaatatatctgattggttggtttttcactaatgatctatcgattcttatagactatcattgataacacagctgcaggatcctgaaagaatgcctccttctatcaaaaacttggttgggaaaacctttcagctacttgtgtgtattgagaatgacaatttgtctggaaggaatgatacatacatggttggtaaggtctggccaggtgttgatattgtgatgattgaggatgctgatgattcagagagagcatctaatcattctcacaccttatcaaacatagaggtatgattgtattttccaacgtctctaaaatacttaatggctggaacataataataaaacgtgatgttttttttgcaggccatgaaattactcactcgcaccagtgaagttagtgagatgttagtgtctgacactgctacgcctaaatccagaggtctatcgatgatataacagtggagggatgctctactaccaagaagatttgtttgaaaccagttaaattggagaaactagatgagaagaatgatgaaatggtcggaaatgaagaagatgagaaaaagtctggggtgaacaatgaagtcaatgagaatcctgagccggattactcagaatacgctggcctctgattatgtccttttcaatacctcattggaaagaaccagcatgcgaggagaagatattcatgtttctgtattttttttctttcatgttgatctaataatgtctacttaggaaatagcagagtaaatgatttactctgattagtagtcaagctttccgtttcatttttgtttttcaaatttatcaataaaatcttctcttctaaacatattcgtttttaagaacaaccataagacatgcaataggaagaattaactaaccttattatactgtccttgaaaatactgtttttctttcatgtatcccattctatgttaatctgcatattaaaaagaaatttaaaagagtactgaattaaacatatacacggaaagaactaagtatacatatgacataaatatattaccaattgatagccgaagtgtattgtcatatatatgctttatataagttatacaataaataggacaaaagtatatgtcatatactcatttatgtgtgacatactcgatccgactaaatttagtccatcaattctacattgaacactaggcctatatgcatatttataaaatgaatatctatttataaaaatatcagattacgtttacaaaatttagtaatttgcctattattttgctaatatcagaagcacaatgaacatttgaacatttcagttgagggaaaaacagtttcattagatatgcaagtaaaatcgaataaacaaccaaatcaaatctttcttcaatatcgcatatcagctttctttgtacttctattaaaaaaccataaaaattcgttatatctaatttcagttatgatttctcgaaatctcataaacatccaaatcatatgtctatcttcaatatcacaactcaacttgatgtatctggcctaataaacgagcttaatccattatatcttataacagtttcgattccatatcttcaactaatgcagattttgttccagaatattcttaaattctattcgattcttgaaacagaattatactattatgctaacctaaacagtttatgcttggaaactataaatacacacatcatttacaaccctgaacacatcagcctactccattttaatagcataaagttcactagcaagatctaaacaaaatgaatggggccatggctacaacttaccttgctgatgttaaacccttcaagactagctggcgtgtgcaagtgaaaatcctccacacctggaaacaatacacagcccagtcaggagaaacactcgaaatggtactagctgatcagagggtacgttcatgttatgcaatatgatcaaagtttttcttaatttcatatatatacttcttgatgataaactataatcttctgtgacagggatccaagatccatgcaagtgttaaaaagagtttggtgaatatgtatgaaaggcacattgcgcttgaccagtggagagttattgagaacttctctttgggtcaagtcaggggacatttccgggttactgatcatcagttcaagatgtcttttattagccatacatttgtctcaccatgtgtttctatttttgatgatccttacatggcattacccacatttcaatccataattgttggtgaactgaatccatgttatttcattggtaggtatttcattaatattatagtgtgctaaattaaaacttgaacactttatcgttaaatataagaccaattttcaacgtgcagatgttcttggtcaagttgtcaatgttgagaacattgacaacatgattgtcaacaacaaatcagcaaggaagctcgaatttgagctgaggaacgaaatgtgcgtaaatagaaagatttatttcattagtttaattgttacttctgtcagaatgatcgattgccatgtactttgtgggggaaatttgctaatcaagtaagccaggcatgtgagaattcaattggtgggattgttgtttgcctaattaggtttgccaaaatcagtacttttagaagtaactgataaaccattatcttacttatatttactaatgtttatgaagtacattgttttgcctttaccattatttacaaatacatttcatctgtaatagggcaaaaccagattacaaatgcttttgatgcttcagttgtcatcattaatccagagtatccagaggtggaagtctttaagaacacgtaataactaaccctttactatgtttttcacttataaaatgttattcacttataagtatacttatagtagagattctgagtctaatgctaattacagtttgccaaaagatggtcttgcactcacaattgctgagactaaaccaaagcttgaattgtctgtttgaagtgatgattacttcgaacactatcctaaaaaatcaatatcctgcttacttgatttcactgaggtataaagtttaatcattattgtattttggttcgttactctggaattaatatcctattagatgatttactaatactcttgcacctattcaagctcagaaatgcaagatcatgtgcaccatttttaaaatagatggtgacatgggttggttttatgttgggtgcaagaaatgtagcaagaaagttgagttgaaaaataacgacacctccatttctgttaagcctaaagaactcacattttggtgtcctaaatgcaaccttaacataacacaagtgtttccaaggttcgtgttctcattactatatatataatatattcctacactttatatatattgattagtaaaataaataagaaaatatttggttataggttcaagttgcatgttggagtcatggatcatacaggagatatcaaatgtattctgtttgatggagctgccaccgagatgattggtgatacaacatttgatctgcttgatggcgtgtatgatgatgatgtgagtaataacaattcagaataagattaacaaatcaaaattttatcattaagttcttatatcgtgtcatttataattcagttgcaggatcctgcaaaaccgcctccttttatcaaaaacttggttggaaaaacgtttcagctacttgtgtgtgtcgagaatgacaatttgtctggaagtaatgacacttacaggattggtaagatctggtcaggtgttgccaatgtgaagattgaggatcctaatgactcagaggggacaatcaatcctgatcatctcatctcaggcagtgaggttgaaatctatatcgattttgttttctactacacattataactatgaactgaaacttttaattattccaggcaatgtatctactcactaacagtagtgaaggtagtaaaatgtcagtttctggcatgactactccatcttccaagagaactgtggaagatacatctttggagagatgttctactaccaagaagacatgcttgaaaccaattaagttggagaaactcgatggcttgactgagattggaaaggaagaagacgagaaggaggttgggggaaagtgatgtaggaaaagacaattctgtgtccaatgaacaagattacactgcaccagattgttgcattcccaatagatcattggagtcagactaatgtcggagagaagatattcatgtttagtttttttcgatgtttttgttcttttgtattggtttaataatgtttacttagggtatatcagactaaatgatttacccttagtagtaggcaatctaggttcattttgtgtttctttctcgctatcatcaataagatcttctcttttaaaaatattatctattactttcatttttataatatatgctatatgaagaatcaactgaccttttaatttcatagactctgcccacctaatccatatcttattctgtagatattaacctacaaatgaaaaaaacgattatattgcatcagtaaaatctatatatatacaaaatagagttaatcagttttcatgattagtgaaaaacaattctttaaactaagtagtttagtacaacttaagttagtatatttgattaataaactatcccttcttcggagttcaatcaggtaaacaagcccactgttgattaatacacatttgtacatttcggtgggggaaaaaactgtttcattggataatcaatagaaatttgctgaacaaccaaatcaagtataacttcagtgaatcaattcagtttgctatgtacttcgtctaaaaaaacgatattattatacctaataccggttacgatttcttaaaatcttataaacaaccaaatcatatatttagattcaatatcataactcatcttaatgtacttggcctaataaacgaggtttctacattgggttagttacaattgatattttgtgagctatatttaagctagcaagttattatatcctaacaatatattctagccaacaactatatattctcaaaacattataaacgcgtcagccacagtcaagcaaatcttatgatcttttttctagattacggtgtcttcctaattcttacctgaatccttgaaagttaagaattcacaagcaatttataatatactacattcaattctttgtgattcttatttaaagagtttcgctagctttttcattattaacacaattccttttttgtatactgtaatgcaggatgaggaagataaaagatggtatgtcaaatgaggatccaaagaatgggtctaacaaacgttctatgcctgattttgataatgaaaattgcaatcctaaccagagtgtcaccagtattccaacccatgttccaaacaagcaaatttttggaagacttttcaatgatattacaaacataccttcatcatcaagtagtccgttccagattccttcttcccacaagtttcctgttagcagtacacaacaaaatatacatcatggtaatatatattgcagttcatttataagtactataatttgcagatgatatcttataatatgtttctcatatgatttcaatattatttagcagattcaagacagaaacaaaatataaatgacagatgctttgataacatatcgaaaacacttactccaatcaataagtcaactataaatgagaaagttttacctgcttcttcattcgtttctccaccaatctcaagatcatccaaaacttcgaatgcaagcaatcatgacaacattttggaatctgcactagacagcgagaactatgatcaatactattgttcatcagaaggttagtttcattcatatacaatatggctttttgaacagctacacgcattaagtaatcagacaatttattaatatgtgttgcagaagaacaagacgaacaaatatatgattgttcaagtgctgaagaggatactgatggacagtcagatgttgaaattgatgatacaaaagttttagaagaagtacagaaaaagctggactatctacatgctgtgaagaataacttccaaaaaatctttgctgatttatgctcattcaaaccaaaaactactcagaccaacccaaataagtcttaatcaaaagccactgaaaacaaaactggtattgacataaaaaaaacttgatggtcttcctgtgttcaatttcaagtatatatctatattttataaatactaactaaacgtttgatatatttttttagagtatattgaccacgacgacccaattcatgagtgtcaggtttgtaaagcttatatgtggtatgatgaacgtattaacaagcagtcaaaagtaaggacccctgttttttccttatgttgtggtcaggggcaagttaaaatttcattcatacgccaaactcctgaattattggttgcattgctaacaaacaatgatgagctaagcagacattttagagacaatgtcagagcttataacatgattttctccttcacttcactgggtgggaaagttgatagatgtgtcacaccaggacgtggtcctcaaatgtttcaaatccaaggagaaaattatcatttaatgggaagtttgaagcctccaaatggtaaaccccctaagtttcaacagctatatattgttgacacggaaaatgaggttgataataggcaaacagttatgaggtgagtttttctattattaaaacattttttgatatttttaatttattatgttgacaatgtaatgtataatctaataactttaactaaacatgcagcaaatccaaggaccctcacaaatataagaagaaacaaccactaagaaaagagctaatccagaagatcatccaaatgttgaatgaagtcaacccataagttgagaaatttcgaactgtcagagacagattcaacactaatccagatgatacatttcatatgaggattatcagtagtcgagagaaggatggcagaacttataacgtgcctacagcttcagaagtagctgcattgattctaggtgattttaatttgaaaatggatcatcatgacattgttttgcaagcaaaatctagtgaactacagaggataaaggaaatacttttatcctatcttgcattacagtaccctttactgtttccttatggcgaggatgggtacaagattggaattgagaaaggtcatgttaaagttggtaggactaagagtaagaagcctcgaaagcaaatcagtatgaggcagttctttgctttccgtattcaagaaagaaaaagtgagtcgcatactcttttaaattctagacggctctttcaacaatttatggtagacgcttataccatgattgagagtaacaggcttggttacataaagtgtaatcaggcaagtttgcgggtagaaaattacaacaacgtcaaaaaggtagcccaaggtgggaatgttgatatgaataaacaaggaagggaaatgtacttgccatcttcctttactggtggtcctagttacatgagacaaaactacttagatgaaatggctatatctaagcattttggatttcctgatctgttcatcactttcacatgtaatccaaagtgacctgagattcaaaggtatgttgatgcccgtaatttaaagtctgaagatcgtccagaagttatatgcagaattttcaagatgaaacttgattcattgatgacagatttgaccaaaagacacctgttgggaaagacttctacatgtaagttttattacaattaacttaatgtttagtttgattatttttcatatgtttaacttaacaatcagcttattcctgcagcaatgtataccatagaatttcagaaaagagggttgccacatgctcatattctactcttcatggatccgagttataaattccccactacagaagatattgataaaattatatcagctgaaatccctgacaaagaagaggaaccagaactatatcaaaatgtcaaggacatgatgattcatggaccatgtggtgctgtgcacctaaattctccgtgtatggttaatagaaaatgctctaaatactttccgaagccataccgtgaggcaactactattgataaagaagggtttccagtttacagaagaagaacatcatcaagatacattgagaagaacggatttaaatgtgataacagatatgttattccatacaacaagcaccttttgttacgctacagagcacacattaacgtggagtggtgtaaccagtcaggttccggaaggtatttgtttaaatatgttcacaaaggacctgacaaaataactgttgttgttgaaccacctcagcaagacagagtgggtaatgattcagtacatgttgaggatactataaaccaagaacagccaaaaaatgaagtccaagactatttcgattgcaggtaaattttgtaatactatatttagaatcgatgccactgtgttgtagaatcgatatagttgtttatctatcattatttcgatgcaaaaacactatatttagaatcgatgccactgtgtttttatgatgtagttgtttatctatcattatttataggtatgtctctgcatgtgaagctgcatggaggattcttggttatgatattcactttcgggctacaccagttgaaactatctttccatcttcctggggagcaacttatatattttaagggtgatgacgaagtagaaattattctgaatcgtgattcagcagagctttctatgttaatagcatggatgaatttgaacaaggtcagtggtattgctaggaaacttacatatgctgagattccaaacaaattcacttatgattcacaggacaagcagtttaatcttagacaaagagggttttcaatcggaagaataaactatgtgcctatgaaatacgaagaaggttattatctccgcgttttgttgaatgaacaaagaggaccaagaagttttgatgagatcaagacagttgggggagttgtttatggaagcttcaaagatgcgtgtggtgcattgagattgttagacgatgacaaagaatacatagaagatttaaaaagaacatgttattggcaaggtgtgagctctgttcgacaattggaacaaagatctagctcgtggcgatgtctcagtagtggcgctttggtcaacagactcgacatttaagacaccaacgaatagtatatgcttctcaagtgaggagctgatagacgaagatgaattatctagcaacaattgtcttgccaagctaggtatgttatcttgttaagtgtagcttagcaaataatatatgtgttcctacttaacactaacggaaaccaactgaaaaatggtcttctccgtcatataatcaggtcaagacgaggtggcacactactactcaaacccggatagaccactctgtatggcacctataaatactccaaggatgagtagagttaacaaccttgtaaggtaactcaagaacaaggtatggtgttggcaacctagattaaccgaaagatggcagatatctatttgaaagaaacaccagtaccaatagtgttgtatgacaaggacgccccaccatatttcgacgatccgggagaagaaggtaaaacatgttaggatctaattcaaagtttagaaactaaattttagtgtagcatgtgtttttctggtatacttatgaatatattattgttatgaatcttgtagctatcatgtagctactattctatttcgctagtaaaaggttaacatgtaacaaaaactttatctaacaaatagtacacctattgcagattacttgcagcgagccctgaaagatgccgactacgaaggagatgatctattcattggcagattgttaaaaaataaagaagattgtgcgactaaactgacaatccatgcaatacggagaaagtttcatttcatttacgccaaatcttacccaaacattctcctggccgtgtgcgtcagccatactttcccatggcgtgtttatgcaccaaaactggagaccagtgagcgttttgaggcaaaatgtgcaacccaacaacacacttgtagtgtagacgtcaagggagactttcacaagcaggcgtctatagctgtgattgtgaaattaaggagaacaaagtacttgggagttggtaggggccaaggccaaatgagttgaggaagataatccgtaatgaattcaacctaaatgtctcgtactggaaggcgtggagggctcgagaaatagctatggacaatgccatgggttctgctatgggaagctacactttgattcagccttatttcaaacttctgctagaaacaaactctaactcgctagtggcccttgatacagaaaagataacaatggtgtggagcggtttaggtacttgtttttcgccctagatgttgtagtcaaaggttatgcttaaatgaggaaggtgatattgattgatgggactcatctgagggggcgatacggcgggtgcttaattgctgcaagcgctcaggatgccaatttccaagttttccctattgcgtttggaatagtgaacagtgagaatgacgatgcttggacatggttcatggagaggctaacagacgctataccagatgatccaaatttggtctttgtttcagaaagacacttgtcaatatatgcaagcatacgcatggtaaattatcgacataaaagtaatgttatcttcataatttacaattatgaaaatgataacactagtatcttgctaatagttagattagttgatacatgattatctattattaataaaccctaacacatggtcatgcatctccaggtctatcacatgtcttcacacgccgcttgcgttgtccatcttaagagaaattttttcttaatattcaagtcagagggtttgagtttttggtagccagtgcggcctgggcttaccggctaaacgacttcaatcgcatatttgctgagattagagcaatgcacggcccgtgtgctgattaccttacatgcattgggttcaaacattggacgcgctcacattttgtggtagataggtacaacttcatgacgagcaacatagcggagtcgctaaacaatgtcttaacaatggcaagggattatccagtaatatcactactagagactcttcgaacaactcttattacatggttttctcttaggcgagaagctgcacagctcgaggggaatcattaacctccaaaggtgaatgagatggtcacagaaaattttgaaaaggggcaggttatgttgtacttaagattggtgatgtattttatgaagtgcgagacaaagaagattcggcatttacggtaaacctttgggagcgaacatgcacctgcagagaatttcagctccttacaattccatgttcccatgctatagaagccacgatcaaagaaaggatatgtgtagagacgatggttggcgtctaccacatagttccatatctgagattggcgtacaaaggtgttatcatgcctatcgccgacatggttacactggcaccttccccaaatgatgtcggaggtgggaaggttgcaccaccttaggtgcgtaggccacctggatggccacagaaaagaagacttttctcaaggggagagttcaaggtaatgttcgctataatgtttattagtaacgttatcgttaacggatattcgtcatgtaaagaattcgatctaacgaaattattattctttcagagagaacatctaccaaacgttgctgaagatgcagggcgatatggcataatagcgcaacatgtagaggacccatcgcggtaacatataagttagcaattaacaacttccttaacaagtaatattaatttacaaccaagtaaattgttgtagggtccttagctgggataaggagacattttccggcgagtgaagggacttttttggtaatggaaggtttgataggatggtgccaggaacgttagacctttggaatgtgtgaaaataatgaagaaggatgatcagaaaaaatttcaatgtatatacatacggactatgatcctacaaatataatattacaatcgggacgatccccatcaaacctccttgtatcaatgtggaaaagtatgttaaatcttttgttaaatgataacctatcttttagcatacattgacaatcgatgagctcagatccaccaaatcacaaaaggttatgagaaatttgaaatcatttgttgtgaatcagagttagcacctaatcattcgtgtatgttaatattatgttaaaggataacctctgcttagatcaaaacaacaaaagtcgaaaagtacaaaaacaacttcaaattacaaggtaacataattgagtgtgcggtaataaacatattatcaagtgtttttgttaaatgataacatatcttttagcgcacattgataattgattggctcagatccaccaatcacaaaacgttatgagaaatttgaaatcatatgttgtaaattagagttagcaccttattatttgtgtatgttattacttatgttaaaggataccatctggttagatcagaacaaaaaaagcacaaaaccacaaaaatcaatgtcaagttacaaggtaacataattgagtctgcggtgataaacatattatcaagtattttttattagatcaaacccaccaaaagcaccaagggttagagttatgagaaatttgaaagcgtacgttttagtttaatacatatgttaatggataacatctggtttagtatgtggatcaaaacattacgggtaaatttcagtaacgaagggtgtgttaataaaaatattagcaagtaccgtgatagatacatagataattgactagacctgaataaccaagcacaacgattatgttttgtgttagaatataatgcaaatgttacggtacaaaaaacccaatggttggatggaaaaacataacactgttgcattgtttgttatcaacaaacaaaacataaaaaaagaggtaacaacctagaagcttttccaatcacataggagtgtaagaaatgttggcattaactaaacgtctggttacatggtaacataatcaagtgcgcagtaatcagacaattataaagtgtatttttaggatctaccagagcacgaaagttatggagtaattgacaataaacctcgtatgattttgattgtagttagcaactaatacaattaactgactgtgctacacggtaacataatttgggtgatcacaatatggaattaataaaagtattacggcttgataaacataagcaaaataccatacacaaaataaagccggaaattcagttcaaacatatcaaaaggcgaaaggaagaaaaactgagtatgttagtcgatagttcgataataaataacttaggatacaaccctagacaatattatagtggagacgatttttttaacttcttgatccaaagtggcaacatccaaattcacgcattcttcaacctcaccggcagcatgagcatgtatgaggaaaacagagagaacacaaaatcaaagggagaggagacctgagggatgctatgcaggcgatcaagcgggaaagggtgtagtaagataggaccaactgacgagttagactgtttgaagaggtaagggagcatggcagccaacggctggagtttggcatataacgctgaatctcggcgaagctgaatgttggaatcgagaatagtgatcttatgcggcgtagtaaagtcctagaaaatattaaaaaagcaaattaacgaggttaaaaaaaagataataatttaaaacacgtggaaaaaattttgtttacctcatctgaatcctgatgagcgttatcaatcatcgatatttgaaaaagggaaataaacaggtgtaagaagatactaaactagagactattcagtggagagatgttgaatgtcagaattaaaattagcaaagaagaacaattattacatgttgagtaggtaagaaactagcttctccagaagcaaaatccacaacctattaaaatttttttaccaagatgcctaagtataatagcaggataataatccttttgcgtatgtaccgtcgttagtatctaataatgatttttactataaggttaaaatgaaaaaataaataaacaaccttcgaagggatttactggctcagggaagcattagatatagcgggttgagctggaacgatttgcataaaacaatagaaaatttatttgcggattcaacaaaattatagaatgcctctgaaggttaacaagaaagtttcctaacaagtgcaaccaaaaataataaactagtaacaaacctcctcgctgacacgtgtttggtgttgggaagaatatataggaaaatcgtcaccagcctgaaacgggacatttaaacctttagcagctacaaataaaattaccgataagaggcaaaaaaaaattaacctctgcgtgtaccgcaagtggaatgggtacaacgattggtggaacgacaacagagacagttgaactgggtttcaactgaatgacggggttcaatgaaacatggacttgaattccactaatctacaagcaaaaataaagattagaacattaactggcagatagattcacaagtgtgtttctcttaacaagataattaaacttctaacatacctcaacacgatctggtgcaacatcaaatccacgagtagtatcatgaattgttaaaccaccataaaccggtaactgagtgctgatttataaaaataaaaaaccgcggcaataagaaatttagtcaactaacttctgttatatcagacttcgacaggaggacggtggaggctctagggtagcgctgacctaattcaccactatgggagataagcacatataaattagtaagcacacatgtataagataagcagaaatgttattgacctaatttacaataaaaagaatagtaatttgttaccggataagtatgttatcaaagcaaaaaaaattttcgttccccgcagatcttatagaaaactacccgataatagtatgattaccaattaacaagcattgacaacaggacaactacaaaaccgtgttaactattttttcatcttcctttattatctaacatggttcccatgtcagatttgccctacaaccaagacaacatttggaaattagaagagatagaaccgaattggtgaaaagaagaaggttaaaatgcccggatatttggtttgttaacgtctaagtacgctaacaagtaacaacgtttagggatgagaatcatttaatttcatcaaaaaaaacttgtaagatttcactaatcttaactatctttataagtaatacaacaaacttaactatctttccaactggtcgtccgcgcctgtggtaatatcatctcccatctcaacgtcgccctacaatgccaacgtgaataagttagaatattattaggtacaaaacaatttaacacagtatcgttagtatccgctaacgatataacctggtcgttcgtctgtggttgtatcatttctcatccccacgtcgccttgcgcaaaggcgtgattaagaaagaaaaaaaaattcttcaacgaattaacccgatatcattagtatccgctaacctgaaattccttctcattattaaaatttgttcccccgcaagactggccgtccggtacatccaccgagttgtagaaagaaacaacgtcgtctacagcagatatagcttggtctccgtgaaaagacggaagggtaaaatcagtctgcataggtacgggttgactcgacggtggattgaggttaacattcgcatcagcaattttgtttttggactccggagaggaactggattggcattttcatcagcatcggcggcttccttgttagcttgaggaccatgttccccaaaagcagcacctttgagattaccagaatcaacaatcaaattttccggaaaccaatgaatcaccctttgataatcctcttggcttgtgcctttagtttgtcatcaatcatgcaggacaaagcagcgagatctacaccaccagacccttcaccttcctcttcaatgggactttgatgctttctcctcagactagtagctgatctagcattgaatggtgttttcctgccacgaaccaccttggttttgccacctttttttttttttagacgcaaccacaatcttagatgggatacacccgccacaaaacatttcattcgaacttgccttcctcagccatcttcacaatgttctcaaccttaacatcatcttcgtcgtcagaccatgttaaatcttctttgggattcaaccgagaatcggggaatataattggatcaacatgatactgcaagtaatagttaccatataaaatatgttaatgaaatcgttatcatgataaatagttacatcatatttaaaaatattatcggataactctagtggcaactttaattacgataataaagctattaaaaactataactcaaatgctatggtggtaaccaaaatgttatcgacttattgtgaaaaaacattacctcgcatttggcatccacatctttagcattgccaagcttgagggcaacgccctgacaagaacctacttcaacggcggcctcttcatctgagtctgacccagcaaactcatctatttgagggctttcctatatggcgggggatgcttccaagacaacgagttgcaaagcgtatagaagaccttgaactgccacacacgtagtggagagctgttcaacttccctctcgttaatgaaaatcatcatcatctcgaaagagagacgagcccaagggtatgacagaaaccccttaagatcctcagccatttttgcttgatctttcattattttcgggtaatgagaggtgggtaacaagaaaccatcaaccagagccaaacaagcatatcacaaccttatatcccgatccgttaccaccctttttagcattgtaataaccctctcaacagtaacatcttcttcaaggccaaacaaagaactgtagtaaaggatctgctctccacccgtccctctcttcttctttttaagactttcggatttgccacacggaagcccggtaactatcttaaactcctttaacgaaaactggacaggagtacctgatataggtcaaattaatcctaagaccactctctcaaataaagaggtcatttgcagcacttagggatcgaattcacaaagctctcggatcacgcaatagactaaggttttgaattaagctaagtaaaacagttatgaaaataaagagaaacaaaaagtaagcaatagcaatcgattggatggttgtgaaacaagataataaaaacgtcaggcttggggtattctcaagaaacagatgatagtagatctagaaatagctaggttgttatcgcaccgttctcgaactcaaactatgattttagagtaaccggtgggcgtgccatgaaactccctatgcctatagctaagaataaccggagaagccaagagatctttaacataaacatgcattattatcaagtttgattagttcacctagtatctaaaccagagcccttctatgagcctacatgttctttcttagatgcctaaggctcatctatgatggatcaaatagcaagtacatatggtgggcatattaaccctttcgcctagcggttcttctccaaaagcaatcaatcggtccggtaaatcaacctcccccatctacggaaaaaaaaaattgggttaacatgatcggcaatggcaatagaaaccctaagataatgagaattgaactctaatccataccatataaagtgaaatccacaggttgtgagttaaatctgaagaagaaatataagatcaccgactccaaatgggactgtgactaggagattggactgtaaaagtttgtgcactggtaaacggttttctcttcaagtttttctagggttatggtgtctcaatgagcgaagatgagaacagataaatatagaggacatggagacgcgactcttcaatattttctaacaaagttctatttagttctttattaattggatcacgcttctccaaatcaaatctctgaaaagattatgttgtcgtttgacacaatactaggctagcggtaatgaaaattttgaaatgagttatagaggtacaattgtatttgtatgatgaacagagtattgggaacagttgaaaatcgagtgacttaattttacagtcttttgagtagagataatgataatacccttctctttattactctcttgtttgaactttaatattatttttttgaatttcttaagcttacaaattgtgagaatatgtttttaggttttgtaatggataagtcatggatagacaaaccaagtttatctcaagaatacaatattagaagtgataaatttcttggattcatataaatcaaatgcagaaatgatgaagtgtccatgtattcgttaaatgtaacaaaaatgaagtcaagaaaagatattgaatgtgacttgatgtgcattggctttttaagctcttatacaacttgggtattacatggagaggatatatgtgtcacagggaatgcaagagtaccttctgatattgatcgagctgatttagattcaactttgaatctcttggatgatcttttcaccgatattaattcgaatttgtctggtgaacacgtacctggatcgtgtgatcaacctgtggacactgatataccatcaacttcaagtggaaattgtggaaaaggagaaggttttgatgatttgtttgctgaatttatccaaaagctatatatgggaagtaataagttcacgaagttgtctttcatattgaagttgtaccatatcaaatgtttgtgtggaattagtgacaaggagatatctatgatgcttgatttgctgaaagatgcatttacacatgccaaattaccagcttcatttaatgacatgaaaaggttattcgaaaacaaggaacgacttatgaatcaattaacgcatgtccaaatgattgcatgttatattgggatgcaaatttaaaaagggagattcgcaaagtttgtaaaccctcttgttggaaagataacatttcttcgcagagtatggtttttggatcagagaataagaaaaataaagttcctacaaagattttgcgttattttcctctaaagccacgactgcaatgtttattcatgtcatcgaaagcagctacccacatgagatggcatacaactgctaatataatgatagtaaacttcgacatccaagagatggagagacttggaagacatttgattaaaaatttaccaaattcgcagctgatccaagaaatgtcagacttggtttagcaaatgatggtttctacccatttggtactatgagtagtagtatagcatctggccagtgatactagttccttataactttccaccgtggatgtaacgcccctgaattgctctatggtcggacaaaccaagggcaagccaaaaacgctacgttgatagctcatatagacgagttaacttaggttccaaacgcatttagacccttatccgaatcatccatatgaagaatccctcaaattgcaagttgagggttttcaacccttgccatgatcgcaagttgtgttagtctggacaagactaatatcgaatgaaacacactctttatacgaaaataatattttataacatataagttctcgtacaacaagtatccaaacgttttaacaatgggcccttgagcatacacgctcaaatccaacaagaatcgaaatcactaagttttgcaaaaccaataactctatatttacattcctatgtcctgagcatctctctaatggctcccactaaggttttctgcagaataaaatggagtcataactaatctaacattacttagtgagctcgtaattccctgtaacagatattagttcttcatcccataattctaacacgaaacacgcatcagagaatagcaacgaaaggtagcttgccgaagcaattacaaaaacatgcacatgcaattttgactccatatttaaataagttttatagggcctgatatgctgccttcactcacccacaccacacattcacccacaccacacattcacccacaccatacacactcttgtgaactcccaagttacaactacaaagacatgtaaccagagcatcagtaccaaacgctacaccgtcgtgtagactgcatcagctagggtagctaacccaatctctccgagcccttcgcactacgtgtagatcgagttaccaaagttaaacaatactccacgatagcacggtgatgcagcgcattaactcttatcaaacacacttgagctttacgtgtttgatattgatctatctttcttaatttgtttgcgctttttacttgggctttgttcctatttcttatttacttttcgttctttgacggtgttgctttctagggttttaagtcttatttaaggttaattctatggatgtttaaacgcagcttttggtttatgaataaaacagagaagttgttctcttctaaagtctttgaattctctcttcttttgatccattgatacgaaagaacaagaaattttagctacgaatctgctctttagaatccattgatatctaaagtccttttcatatttgttccctgcattagtaggtatcaaagacaaaacgatcctaatcatgccacctaagaagagtcttcaagcaacattcgaagagcagaccttggcgttcagagagatgatgacagagtttcagcaaagccttggtgatacgatttgaaccaccatggaagcggcggtgagaactcttgctcaagctcacgacaaccgtgttcttgcaacaacaaaagacaacttttcaaaagacgttgatgatgaggatgatgacgttgaagataactcgtttgcaagggatcatgttcgacaccaacgtgatgtcacgtaacttactacacgaaacataagaacaattggtttctagatttatcggtggtttgcgtctacaattacagaattcatttctccaagtaaaccccatttcggtatctgaagctcaccagcaagctctcttaatcaaaaaacaagccgttaacgcttcttcttcatggaattcttcaacaacaggtcaatgtggaggttcttttattgatttgggaaacaataagcaaacaaaggttactcttcaccaacctatcccgccacgagcaattgacgcaggcgaaggtacaattgcccatcgtagtaaccgtcttgctaaatgttttggatgtggagaaaaagggcatagaaaatctaattgtcctcatcaagggagatgagggctcttcatcagagatgacccgatatacgatgaggctgtagaggatgaggaaaaggatatgcaggttgattacacgtagaagcttcttgatgcccaatagtctcgaagagccttggctgcgtacggacattctttgctcgacttgcacaatacgtggaaaagtttttcgcctcgttatcgattttggtagttgtaccaatgccatttcagaagagactgtttataaattcgccttgtctattgaaccgcatccagttccatatcgcttggcgtggttacaatcgaaaacagataagcgtatttctaagtgatgccgtgtattgttttcatagggagaaaattacaaggatatactttggtgtgatgtcattcccatggatgcgtgtcatctttttgggtagtccatggcaatatgatagacgcagaatgcatgatggctttgtcaacacttacagcttcacatttgaagaaaaacgcatcccattattgcctttccaagagacttcaaacaagagtttctgtgaaaaagttgcggaccaggctaccaaaaaggtcggggaacacaaacctcctaagtattgtactcgatcacaatttttggctgctactcaagagacggatacgatgtcggctccgccgacgaccatggatatgtcatcttcttcaaatgcagctttagcttttcctaactctctccacgatgttgctggtttgtttcatgaggagattcctttagtggttcaggatgacaatgctaattcgaggtcaaattttttctcacccaagagacctgatgtagcgcatcttctcttatcaaacacacttgagctttacgtgtttgatattggtctatctttcttatttttgtttgggctttttacttgggctttggtgttatttcttatttacttttcgttctttgacggtgttgctttctagggttttaagtcttatttaaggttacttctatggatttgtaaatgcagcttttggtttatgaataaaacatagaagttcttctcttctaaagtctttgaattctatgttcttttgaaccattgatacaaaagaacaagaaatcttagctatgaatctgctctttagaatccattgatatttaaagttcttttcatatttgatcctgtattacacgacctacaatgaaggacagctatatcactgtcttgatacgcttatggttaactctgactccaaacacgagcaccatgtatcaagacccaatacttcaagatattatgagacatatggttaattaaacacatagaatcatcaatatccttacctaaacaacctctcatatataagcctttacatataagaatctaaatgataacttatacggcttaatactaccattcacaccatcaattaatattcaatactcattaaattcacgaaatcaatcaatgaatgtaagactatgtaatcaaaccatatctagaactcaccctaaacgcacacaaccaagcaagcaatcaatcacccacataaatacctgttaagtcaggatattgggctgcgagagatctgtctcgtcctacttgtggccccccttttcagggaccaggtgtttcggcacttcaggcacaagtatggaagcttaaaactacgcggaagcttatgcatttcgcgtggcaatgtatctctggttgtctagctacctgtcaaagacttacatatcgtcatatgggtacggataaaggatgccctcgttgcggagaaacagaagaaacaatcaatcatcttctatttcattgtccaccgtcgagacaagcattatcgcctattcctacctcagggaatattttccctagaaattccctcttctataattttgtctttctcttttggcgtgggcgagaatttgaaatcggagaggaggtattgaaactctttccatggatactttggtatatctggaaaagtagaaaccgttttgtttttgagaacttcagggaacctcccccccccccccgaaactttggcgttggcacttaaagaggcagcggtgtggaaacatgcaactctaaaagaagatgcacacatctgcctaattttttttctaagctctcagagcccgcttacccgtctctctgaaagtcaacttgatgcttcatggcatgccgatgactctcttagcgggcatggatgggtccttgttcgacaagactcaatcctccatcttgggctcaagagtgctcgtcgaagcttatcaccgctccatgcaaaatttgactccttgttatgggcaatggaatgcatgatctccattggcgatacttctagtacttttgcttcagattgctcagacctgatttctatcctaaacaaccaagacgattggccgacattcgtagcggaattggcttcttaccgatctttagtttgttttttcccttctttcaatattagatttcttcctcgtagttctaatactcgagcagatagtttagctaaaaaagcttggccttgaaacagtcttttctcccatgtaagcacatcggttcctgaatggctctctctagcggagagtctcttcccgataacttaatataaatggtgtttgtggaaaaataaaaaaacacccaaacctatcatctgccatatcacacgcttcaagactcacagagattcggctaaaggtttaaggttagcaacgatctcaacatcttatgacttcctaactatgatcccaactcaacttcccttggctcatctcaacttcattcatcttgatttaacgactcttcattataataatagccttcaatcttgacggttaactcaaaatcaacccttataaatagtttctagacgaaaactaaatcatgggaatgattcaaagaaaacagactatcagatttctcgatcatttcttgattatgcttgacgttcctcaatcagaattcttggatattgctcacgatcacaacaattcctccgtagcagcctttcagtgttttccctctcttccttttaaatgacacgggattaatcgagtgtttataggcatatttaccttgcgctccaaggtattagatattggcgagtgttgacacctcacgggacaactgtcaagcatggcgaacggtggcgacacatttctccgacgactttggctcaaagcaacaagaaatttggctccaactctctaaactttggctccaagtttctcagtcaacgacttggtcaagggtcgatgtttggtcaatggttgatcaaaggttgcggcttgtataatgtggtatggtcgttgtcgctcggattggtaatactttaatcatcgttcgcctgaatcactattatctcaccaaaccattgttcttttcaaaattctcccgatccaaactaattttgactcgtccaacttacttattatctatccttaatggtttttagattctttttaagttcatcttggtctcctcttgatcatcccttgtacggccatttacccttaagcaagggtcactacagtggatgtcaatgaatcacacatcaatgatcctccatatggttatctcctggaaacacattcatggtaatgatatcgatgtatatatgcagccactaatcaaagacttgaagcagttatgtgattatggaattaaaacgctagatgcttccacaaagcaaacatttaacatgcgagtagctatcatgtggataatgtttacgacatgaaaaaactgtttaattggttatcgacgttttcttcctcgggatcatagctttcgtcaaaacatggtacatttcgacggaaaagtagaaacaagatctccgccagtaacattgacaggttctactattattcatcaactagaacaagttaatgttactcttggtaagaaaaatggtttagttggagttgggaaaaaaaagaaagcaacgtgatgcaggaagatgtggtacttattagtggaagaaaaaaagtattctctaaagttgtctttttgagtattctttcgtgagctaggtatacgttctgacttgtggcctgatgataatgagaaatatcaagcaacatatttttctttgaacaatcaagcgaaagacacttttttaagtgtcttccagaatgttaaactccggatgattatgcttctaatttatcaagttgtgttgatgtcaatggtcgaaagctatcatgcttaaaaagccacgattttcatgtaataatgagaaatctattttcacttgcgatttgaaatctgttaccaacaaacatgacatcaacaattgttgagctttgtcgtttttgagagatatatctgcaaaggtgcttgataccgatgagatagataaattacaatacattattttagtaactttatgtcgtatggaggtttttttcctcaatcatttttcacggtgatggtgcatttagtagtacatctcaccgaagaggcaaaatacggtggaccgttccattttgttggatgtatccgaccgagaggtgaggttttcccattttatgtttatatatatatatatacgaaactgaaacttactagattcaattatatacacatgatgttaggacacttcaaatgatatgttcgaaattgcgctaagcctgaaggttctatatgtgagcaatatttagctgatgagtgtgtaacattttgctcaatgtatctcgatgatatagagacacgatttactcggattggccgggttgatgatcgacctctagctgagactagcataaacccaaattcagaacttttacttttatttccaaaccttggaatagttgttggagcgggtaaagtttatactcttaatcatgtagagcggcaacaagcacatcgacatgtattggtcaactgccaactactagatcacctacgggagtaagttctcttattcaagaacaactaattttatttatgttttattgaaattcactaatgtagacgttatggttattgtatgtttaggaaatataaaaccgagttgttgaataaacaatctcatcaaagcaggaggaatcgtgttatcgatattgacagagaaatgcatcttagttttgcaaaatgaatcaagtagaaagtaaagacaaaatgagttagatgagctaactgatgatatgatgcttagctctgggtccatctgaaaatgttttaaagtataaagcttatgatgtcaatgttttcaaattccggacaacaaaaagagaatcaaacctgaaaacacaaaatagtggtgtttttgtggctactgagactacgagctatgctagttctcgtgatcctaacccaagaaagggaactgtagcttactatcggaatctgatcaaagttatagagttaaactaccatgaagttttcaaagttgtaatattcaagtgtaagtgggcgggcactcttacagtaaaaggatataaaatagatgcatattgtaacaccctatcccgctattaaaatataaacaaaataggagcatcacgatagacgcccgcagtcggccaacccaggttttcgaaacaaattcgtttgcccgagtcgtcaaaccgtaagtgtccagcctctcgaacatggcctaaggcttttcaacccgtattgcacacgagtgttgtgtaagtcagaaaagactaatatcagtcggtctaccatataaattttagaaatttgagtctttatacatatataccaaatcgcatatagttttcgcatcctctttgaaaaccatacatcatatgcttagtaagaattttacaaaaagctgtaaaacctacatcggttcgtcctaagtctcttgcgccctctacaaggctggtcaactaaggtttcctgcaaaataagtagcgtcataagtaatctagcattacttagtgaaccccgaatctagatagagttaacctaatacccttacccctaagcagaaatcaacacacaataatactacgagctaacaaaaataagtacgagttatacaagcaacgcacaatcaaagatgacacccaacacacaatgcaagcaaaatgtaatgcacaatgtataatgcatgcagactcaaattcctaatatgcagcggacaattaatgcaagcatgcttccgataacctaggtaaggccttctacgaatacatgctatcccgaggcaatggcctacacactcatagacacagagtctaaagaagatcgtcattccttatactacatcgtcatttagcgcctggtctgtagcgaaccagccccgagcattcgtatgtcataacggaacgaagttacacgcgacgcacagcctatgggtggaataacaagatccggctaatgctagttgactaactaacatgacaacagactcacatactatcatgcattccatcctatatgaaaaactttactaatcaaacaactaatcgtacttaattactactaatccttgtttagctcaccctaatcatgcttaggaaatactaatcctaattagccattactaatcataattaacaattaataaacctaattaactatcttaatcaaggattaagcaaataattaagataagtaattaaaattaacctcctaagctgaattaaggaaataagtgaattaaatatcctattcacgtgctacttatcgtgacttgagactcacttggattttccgagcggtttaggcttccgaaggtttctcagcgaactgggattttctaactattttagatctaggaacaaatgggcggaggagggagtatttataaggtcctaaagtcggctattatgtcggccatggaagcacgaggtgaccttggacgaatcaaattgcggcagattttgtcccacaggcgcttcaggacactaatcggcctctgattggttctttcgagtttttcggataatcatcattcaaaagtggataagctcgaccctaaatggataaggattatcggaatgtagataagcatcggacctaacggataagcttgagccactattcaatcatggccgtccattctctcatttcggcgaaacctactatttatcaccggtccgcaagaacattgagacgacattctccgtcaccaatatctcaagagggtccgtgaaacaattcaaggcttgcttaggactataatacgttccatgccagaattgaccgagcatgccagctatcgtcactcatccgcattgtccaatcaatcattttgaccatacacgacccactctcatattggactacccgagatcgatttccctcgaccctctaagtttttcccgaccctttaaggtttcctaaaccaaaacaaaggttccttaagctacactagttcttggggtttaccgatagtcgcatcgtagctaagcttggcccgtcagatggagattcattcttttacccatgtacttgatcctattcaatgctccttacccatgacttaccacactaattggcccgactgatcttgccttcccttggcttgatctcgcattttactcgacagaatgcacgttcgaccgtccgggtcatagttaaggtccgaggcattatacatatggtcatcatatggttaatttttacacactggagataacaaagaggatgaaccatatatattggagtctcaagcaagaatggtatattatgtacaagatccttcttagagtgattggaagattgcagttcatatatattccgcatagagacatgtatgacatgggagatatagaacaaccgaatgatgaatttggccctcacaactccactaatgcttcctaagaaaatatttataatgtcggcatatgtggctgctagtaattgtttctccataatcataatatttgtgggatctttaatcaaatgtcatacaaattaggtgtatttaccggaatcttgtagaacatttttttattactatcatatttcggacctatttggtatacccatcgtgaacctactaaacgttacagaaaaaatataattacaaggaatgccattgtcacgtcagcaaacccgcgtcgccacgtcagaaataattgacgtgtattaatgaactcgactgttaggagatacagcggcagttacagctgagtttagggtatgttgcgtttgactaaagacaaaatggctgagttatgacaaaacgacgaaattatgagtataatttagcctatagttatggctgatttataaaatatgtctaagttatgagataatccagcctacgttacggctgagttaataaaatttgtctgagttatgagaatttcaagcataacccacacaacgttatggctgagttatgagaaaacggctaagttatttcctcgacacggctaatttatcatttttcggctggctgagttatcaaagatgccttagttatgggatgtcgttatggctgagttattttcgagtgtcataaatcagccgtagagagctggattagcggataacttggccttgttaagcctgacttattagcaaaagattaattactataatatcatgcaattacaaccgaattattaaacgatacggctgagttaaagattttcggttgagttacgacattagaaggctgaattaacttggcatttttttgtttttaattactgtaatagtattcatcttgcgactgacttatagctttgcttgatagctgattgatttaggcaaatttacatgttcgtttggtggcttacttgccacttcatcaattaaaaaatgacgtctgatgcaacattccatgtcatcatcatcaacggaaatacaaaacatccctagttttttcaacttctctcttcttctttgtgttgtttttcacccgagttgtctttaacctgtgtctttcacatcaccagaacttttaattcgtcatcgtcttcctcatttttcttcattttctttaatccttctctcgatatgcttgcctccgattgttgtaaaccagcaagaaaggcccaagaaaattaggattacattatctttggaagtcggcattggaaataaacgccttagaaagcaacatgcatgttctctatctaaacaagttgggtataatgctaaaacttgtcggacatagtattgtttgcaagaattttctttctcttctttatttattagcagtaatatgtagttcgtgacaaatcacctatcattatagactctaagaaccataacacattataactcattgagttttaacctttcgtgacaaatcagccatacgcattataactcaactgtaacatgtaaggttcggtaaatttacatgtcacggctgagttatatgtttcagtaaagatgaaaggttgtgtaaattatatgttacagctgatttataatgcttcagagaagacgaaaggttcggtaaatttacatgtcacagttgagttatatgtttcaggaaagatgaaaggttgtgtaaattatatgttacagctgagttataatgcttcagggaagacgaaaggtttggtaaattaacatgttacgattgagttatatgcttcatgaaagaagaagggtttgtaaattatatgttacgacttagttttaatgctttggagaagacgaaaggttcggtaaatttacatgtcacagctgagttatatgcttcaggaaagacgaaaggtttggtaaatttacatgtcacggttgagttatatgcttcaaagaagacaaaaggtttggtaattacatgtcacggctgagttatatgctttagagaagacgaaatgttttgtaaattatatgttacgactgatttgtcacgatttacatattacgactgagttacatcacattacagctgagttataatacatatcggaaaataatatttttgggaagaaaatataaaatttattggtcaaataacaacaatcaaattaaaaacttaagaatatatttaagggagacatatgaggaagactaaactgtatgaattaaaacatagatagaagtagaagagtcactagtcaacaaaactgtatgaatcaaaacatcgatagatgtagaaatgtctccaaatagatcgattgagaggaagactaaaagagaatcatgtaaatccaaagaaaaagagtagctattactgctttcaactcaaacctgtaacaaatcatgtagaattccatagacctctttgatttggatttttatttttgatgtttttcgtgaacgaggttgcgtgtagatctgacgaagcttttgatttgggaccctatagcaagcgttgtggctctgaggtctaggaagatccagcccaatcatataatttgaagacctatgtccatgttgtacccaagttgcaattattagatctaaaagcttttcttggattttgagacaaaaaaaaagaggagggaaataaaatgattttgaggagtgtgagattggtgacgtgagttaatgacatggacagtcaaatttttatttattattttttattaaaaataaaataatcaagagtgttaattgtaattacacaaatactcaaaatatatgagtaatttttaaaacatgtataatatcactacaagaaaacagacaaacaacgactacagaaagcaacaacagatgtagtcgtcgtttttggcgactacgtcacgacagttttacgacacatatacgacaacctgaacattagtagtcaaatagtcgttattttacgactaaatatgttagtcggcaaatactcgtatagtaacgactatttaacgattatattattgaagggagacgtttgtcgttacatagtcgcaaatggacgactacaatttccgactgcgacagttagtcgccaaatcggcgactaaaatacgacacatttctgtaatcgtaaaatagtcgcaactgagtcgcagagtagtcgcattaagttgttggaaaacgttttccgcattgccaagtaggtacacctaatttgtttgttgtagtcgtaaattagtcataaaaattcgtctatataatcaaaattcacgacaatcttctttcaccaacaaatcaaaacaacaatcaaaaggaaaaaaaaacggaaaaaatagaaatttagtttattctataatggcgggaaactacaattattgcggtagtggcggtttctatcgagattggatgtacaagagattcgatgaagtgacggggaatttgtcagccgaatacgtcgcaggagttgaggaattcatgacattcgctaatagtcagcctatagtacagagttgtcgaggtaaatttcattgtccttgtagtgtatgcaagaatgaaaaacacatcatctcgggtagaagagttagtagtcatttgtttagtcaaggatttatgcctgattattatgtttggtataagcatggagaagaattgaatatggatatcggaactagttacacggataggacgtattttagtgagaatcatgaagaagtgggtaatgttgtagaagatccatatgtggatatggtgaacgatgcatttaattttaacgtggggtatgatgataacgtgggtcatgatgataactatcatcatgatggtagttatcagaatgtgcaagagccggtccgtaaccattcaaataagttctacgacttgttagaaggtgcaaataatccattgtacaatggttgtcgtgaagggcagtcgcagttatcattagcatctcgactcatgcacaacaaagcggagtataatatgagtgaaaagttggtggactccgtttgcgaaatgtttacagattttttaccagaagaaaaccaggctaccacttcacattaccagaccgagaagttgatgcgcaatttaggacttcaatatcatacgattgatgtttgcaaaaacaattgtatgttattttagaaagaagacgaaaaagaagatcaatgtcgattttgtggcgcacaaagatggaagcctaaggacgaccgtcgaagaaccaaagtaccatatagtcgtatgtggtatctacctattgcagatcggttgaagagaatgtatcagagccataagacagttgcggctatgcgatggcatgctgagcaccaatcaaaggagggagaaatgaatcatccttcagatgcggcagagtggagatatttccaagagttacatccccggtttgctgaagaaccccgtaacgtttatctcgggttgtgtactgatgggttcaatgcatttggcatgtctcgtaatcattcgttgtggcctgtgatcctaactccatataatttaccccctggtatgtgcatgaatacagagtacttatttcttaccattctgaattctggaccaaatcatcctcgagctagtcttgatgtcttcctccaacctcttattgaggagctaaaagagttgtggtgtactggagtcgatgcgtacgatgtttcattgagtcaaaattttaatctaaaagcagtaccactctggacgattagcgactttccggcgtatagcatgttatcaggatggactactcatggtaaattgtcttgtccagtttgcatggaaagtacaaagtctttttatctacccaatggacggaagacatgttggtttgattatcaccgtagatttcttcctcatggtcatccatctcgtaggaacaaaaaagactttctcaaaggaagagacgcttctagcgagtatccacccgaatctttgacaggggagcaagtttattacgagcggttggctagtgtaaattcacccaaaacgaaggatgttggtgggaacggtcatgaaaagaagatgcgaggctatgggaaggaacataattggcacaaagaaagcatattgtgggagttgtcttactggaaggacctcaatcttcgacataatattgatgttatgcatacagagaagaattttcttgacaacatcatgaacactctcttgggtgttaagggtaaatcaaaagacaatatcatgtcaagattggatattgagaaatattgttctcggtcaggcttacatattgatagtacgggtaaagctccttttccagcgtatacattgacagaagaagccaaacagagtttatttcaatgtgtgaaacatgatgttagatttcctgatggttattcttcagatttggctagttgtgtagatttggagaatggtaagttttcaggcatgaagagtcatgattgtcatgtttttatggagcgactacttccatttatctttgccgaacttcttgaccggaatgtccaccttgcattatcaggtacaatactaactattttttaagcagaaatttttttatctaattatttaacttgcacatatattttaggaattagagcatttttccgcgacctatgttcgagaactttacagacaagtcgcattcaaattctcaaacagaacatagttttaatcatctgtaacttggaaaagatctttccaccatcatttttcgatgttatggaacatttacctatccatctcccatacgaagctgaattgggtggccctgtccaatataggtggatgtatccatttgagaggtttttcaaaaagttgaaaggaaaagcaaagaacaaaagatatgctgcaggctcaattgttgagtcatatatcaatgacgagattgcttatttttcagagcactactttgtcgatcatatacaaacaaaatcaaggtaaatacctttatttatttaacaatttgctatactacttcgatcttaattcaattatatgtggcaggttaacaagattcgatgaaggtgaagttcatgtatatcatgtccctggagtacctaacatatttatgcaggtcggccgtccaagtggtgctgcatgtagaacagctttcagagaaagattaccaaaatgcacatgcatatgttttaagaaattgtgactattttaaaccatttgagaggtatttttaatcactttgatttattcatagctaagatcactttgatttatttgtcttcgtttattgagacagtatgttcgaggattatctttctgcgaaatatccatccttggccgaaaaagaactctacgtcagaagagctgaagaatatcatctatgggttaaagaatatgtaagtctacattaattttggttcatgcatataactatttgtctgttttcttgtagctagtgatttaatttaagatcatattgatattgtttatctatattatgtaggtaacatattggaacactaattctccatttcctacttgggttcaagagattgtgcaaggacctttgaacaaggttaaaacttggccaatgtatttcacaagaggatatttatttcatacgcaaacccacggcgctggacgaaagacatgtaactatggggtatgtgttaaaggtgaaaattacgctgattcatctgatgaagcagatttctacggtaccttaactgatgtcatagaacttgagtatgagggcatcgtcaatttgaggatcacactttttaagtgtaagtggtatgacccaaagctcgggagaggaactcgccgaaaccatggtggcgttgtagatgttctacctacgaggaaatacaataaatacgagccatttattcttggtacgtaattaagtatacttgaaatttctaattcattaataaataatgttgcatatgattttgttgatatatgtataacatgtttgaacagcatctcaagcagatcaagtttgttatattccatatccatatacaaagaaaccaaagaacatttggctcagtgttttaaaggtcaatccaaggggaaacatttctggacaatatgaaaatactgatccgagactgttgcaaaccgaggatgatgaagctgttttgcagactacaattgaagatcttgtaatagactatccggtagcaggcgtaaccccaatcatcctcgattacgatattggagatgctgaaccagaagatgaattccgatataatttatcgtccttggatgaagatgaaatagaagacgaagatgaataataattgtgtgaaatatatgtataattatttgaataagtatttgaataaattttgtaatatacgatgtatttgaataagtatttgaataagtatttgaataattattaaaaaattattaaataattttaaaaggtataaggtgacgaagttacgactattatgcgactaccatgtaagatgttgggcttcgaataacaaagcccaaacccaactcaggtggtgacaaatatacgactatacagcgactatcttgtaagctgttgggcttcgaaataacaaagcccaaacccaacttaagtggtgacaaatatacgactatacagcgacacttgtatatgttgttgggcttcaaaattactaagcccataacacttgtgacgattcggcgactatggggcgactacggtgtaagttattgggcttttaatcgtcgaggcccaaacccaattgatttagtgacaaatgagcgacaaatatacgactactccagtgttgaaaaccctaattcgattcatttccccttcgatccaaacacttagccaaaaattattcttcttcttcgaacttcttcttcttcctcgatcttcttcgatcttcttcttcttcttcttctttttaaccctaaatcgattctcttcttcttcttcatcttcttcttcttcttcttcttcttaaccctaaatcgattctcttcttcttcttcttcttcttcttcttcttcttaaccctaaatcgatccgtctttcaccaacaaaccctaatacatctcgattcatctcgattctctcatcttcgattctctcttcttcgccaaactctcccttgcctcttcgatccatctcgattctctcatctccaagaggatgcctaacgccggtcgtggaggatctcgaaagaggaagaccacaccaaacgtgactcaaagagccggaggttcaacgcctgctggaagaccctcttcgctaccgcagcagtacgatttcaccccggcggcggcggcggttcaagtttctgcatcgattccgcctcaaggagtcggcgccggcgcctcatcctctgcccccactaccgtaactacccaccaccgcagcaacactccaccaatcaaccacagtgtatagatccgttgccaccacaagagactgctcagcaagaccctcctctttcgccggatccagaaactgcatctcacagtcatccctcatcgcaaggcaacaacttccaagagggcattcttgcagtgttgccggagctccaagaagactttgtggttgctctgaatgacattctctctgtgcctggcagagaagcgtggtgttgtgtgttgtctcccattccccggccaaaaaccgaatggtaagttcactttaaattccctgttttcttgttctgcatgctctgttgtgaatcaaaccgaaaatgtgaaccttgttggctgttgtgttgtgaaacattgttggctcttgtgttgctagtgttttcgggttaggcatttagtcaagtttagttctagactcattagtttatgtaataatgcctgttttattgttgtttgatgctctgttgtgaatcggtcaaacatagttgagtgttgtgttgtgattacattagttcttggtcattagtttagttcagttctaaactcgtgttatgttgttctatattacacaaatgatgatgctttgattgtgaatgatgctttattgttgagacagtactattgtggaacatagtttatagtcgtgtgtgacttgtatttcttttgggaacataactttgttcacttttgtaacatgtttacttatttctttgttgcatgtgtttggaggtttactcgagacagaggatctcgcttggttaggaagatcactagaatttttttacaaaaattcgatgctcccttctataactggtcatgtgtgccagttgataaaagagaaagattatttttagagtttgcggtaagcttcctctatatgtgctcttgttcaagttaagtttctgtagttttactaacttcttccttttttttgtagaaaactcaccagtgggatcccttaataacagggacagtccagtattacttcaatgagattgtcaagaggcgcttgaaggacatggttagcaccgcaaggacaactcgagagcagcctccatggattggagaaacgctgtggggaacaatgtgtgcttactgggacacagaagcagcacagaaaaggagtcggacctattccaaagcccgtctctctgaccgtaacggtatcggtcgtcacgtccactactctgggccaaaatcttttcaagaaatccaagatgaattggtaagtgtttctgcagattctcataagttagagttttctgttttctgttttcaatccaatatagtctgttttcttgtgagtatgttgagttcttatgtctgttgactactgttgatattgatttgtgtttgtaggaagagaagttgggaagaccggtccatcttggttaggtgttcatccaaacacacactaagtcggatggctcatttgttgatcagaagtcggagaagattgctcaagcttatcagcagaatgtgagagataggttgtcagcactagaggcggctgcttctgctgtctctgatggctcttcacgacctccggagctcacactagatgattatacagccatctttctcgaggtaagatgttttagtataattatgagtcttagagtccaattaatattctatcactaatgagcttcttctctatttcttgcagtccacagaaaaggattcaagaggcaatccttatggacttggatgtctaaaagacactctaggcagcgccaaccgccatcactccggttcctcatcatcctttcaagccctagaagaacggctgcatgaagctcaaaggaaaatagaagagcaggttgcatataatgagaagagagatgctgagattgctgcccgagaagctgagtcatctcgagttacagctgagcaaaaggacaagctcgagcaattgtctttagtcgagaagtatctccgccaaaccgatccgcagttcttggacttcatggccagtcactctaccacaaccacagaacatctaccaagtcctccacctaatgatccttagattatctttgcccaaactctacttgaacttatgtttatttgaataagttgtttgtgtaataaacaagataattgtatttgtatttgaacttgattttctatatatacaagtcttttcatcttttttagcatttcaaataaaaaaagagaaaaaatcataactttaaacaacaaacaagaaacccaacaatcgatgaccaaattcttattcggacaaaacaagtagtctctcagtagtcgtatttaggtagcaaattagacgtaaaatagtcgtataatagtcatattaattaccgattattatccgactaaccaacctagtcacaatataatcgtccatgagacgtatagtagtcgtaaaacattatacgactattatatgacaacgagaattatttccttacattgatagaattagtcttcaaatagtcgtcaactcgtcggaaacacttatacgactattatacgaccacgtgtttcacacgctttgtacaggataattaatcgtgctatggtcgttaaatagtcgccaatattatacgactatacaacgacaattgtttactgattgtgttattgtcgtaatatagtcgtcgatcaacgaccacgactatctcactcagcgactatgtaataatgactaacgtctttagtcgccgactagtcgtattatcattttttactatgcgactgcggtgtaagtcgtttatcacctgttttcttgtagtgtattatagtaataaacatacttttctataatatctgagtaattaattcaatatttgttgatatgttggcattagtttgatggttgtcttatttttaggacttatttgcatcttataagcttgttaaataagggagcgagattattagatatgattattctactaaacagaaaccacataactaattttgttgcttgtttatataaccagggaggtgacatttttgtgtgagggaggagaagttgtgtaaatctagacaatatgttttgagtaagactttcatatttcgccaatcatgcttagcaagcttttgtttctttgtcctaataagaattattcagaaatattatgatcttcaacattttaagattattttatgtttattttctttttaaattgtttttgtatacactcgtcacttcataaacgagttgtaggtatttttgggtgatatttgcaggtacaaccacattccgaacaaagttaaaatcatttgggccgatactggtccactgtactagactaaatcaccatttacgcattcagtatcgctcacgtgtgttggacaaaacttttttgtatttcttcgggtgaacgacctttgtccccccacgaagtttcatatagtaccacaattatatagatttcggacctcgtttccagtccacacaaaataaacttaaagttttgtatctccctaaatcgaaagttcgatacttatgtctccataaattcaaatttcgtggtttaatattggtttacatcattaaccctatgccaaaccaaaaacccattatagtaaaccgaattgcaacccgattcgatttatttacaacccaaaataaataccaattagaagaatcccaaactgagaaatctaagaacactaatttcgattccctctcttcaacatctttgagttgttattagctgataagaatgcaagagatggtaatggtctgaaagagtatgatattcctcgattgaacatgaagaagagaaaacgttttgaaagcatcgtgcaaatgactgtggctggccaaatgtccaagagatttaaaaagactctcaatcagcattgattcattgtgggttttggaagttcttaggatggtactgggaataaacttgacaatgtcggatatagtgagacctccaagaatatacggcatatactctgtgtaacaacatcatgctcaacgaattaagaagaaagccaaagatttatcgaagaaataatgtgtttgtttccttcttcattcaattttgttttcttgattaatttaatattctaaattgtttacaatttcaatctaaattctacctcaaatccgtttatgtttcatttgttatttatgtagtatgttttgctcatactagagctcacacgtaagatgttaagagagggaatcaaaattagggttcttagattttcaatttggggatttctctaattggtttttatttcgggttgtgaataagtcgaatcggatgcaattcggtttactataattggtttttggtttggtatcaagtttataacctaaaccaatactaaaccgtaaaatttgaatttatggagactcaagtctcgaactttcgatttagaggatataaaactttaattttcattttgtgtggactaagaacgaggtctgaaatctatgtagttgtggtactatatgaaacttcgtggggacgtttaccctatttcttccaatataacattcgcatcttttccatcagacgcatgtaacggcacattgattttttcacacatccaacacatgcatgtaaatcggtttgaacctggcttaaccaagaaaaccacaaaatcgattttctttttcttttttttgtcagaaaaaaaatattttgtagcttttcttggttaaggcaagttccaaccggttttctcacatatctaaattgattactttaaatttttaatcaaaaaaggcaaagagatattattaaccaaatcgataattgcctttacattcttcatctcttcaccgtggtttcacgtttctccctacaaagaaaaaaaataatctcttcacgtttttagaactcaagaagacaaacgtaggtgtgattttgttgctctcgtctaacttaatttgaagtaagttctagaaacctaaatcttatggttaagtttgaggtatttgtatataggctgtttatatttgacatggaatttgagatatgagctgaaatagtggcataatttaacatataattagtttgattcacatatatctccttgattattctttgaatttacagaatttaggtgatgttcttgatgctcacatttcttttccctttgataaatatttcaattgccttggatgttgtagactttccacttagtaaacatgacaagaacaacagtaccaacaacaagaaagggaagcaaaagagaaccagcaaaaccaaagaaaacgattatggctaccagatccaaagtaaaagcaaaggcgaaagcacaacctgaatcacctccacaacaagaactgccaaagaaagaatggggcacaaagatggttaaaggcgtcaactatagagctgcgtgtcaaggagctttagtcgtatccactctctattccgatgatttcactcttgacgcgttgggaatttgcgatgatgtggcctggctcttggggattacgaaagttcattttgttgaagtacggagcttatgagaagcttactaaggagtttcttggaacagtcagagttgcttttgaggatgtcaagtcaccgaaaaccgcgatattatattttcgcattggtgacacagagtactctatcacgattcgagatctttgcaagcctttggtttcagtaataaggacaagattcggttcacacactgcaaaagtacttgctctaaatggacaaaatttgcatatgatacctacgaaggtggttctaaagcggtacaaatcaagcatcatgctttgcgttatgcccttcgaatgttagccaacactatgttttttggcgcagatactatcacaatcaaagaaggtgagttctatatcatgatggcaccattcatcaacgacccgtagaaggtaaaccttggagcacttctcacttgtgagttggtagaatataagcattatgcttacaaaaaaagggacacgtgagctgtttttggcattggtggagctgatctgtaatattggaggcttgtgggattgatctgaaagattgatcttgctttccttgggcgtaagcactacttgggaggatgggttgataaccctctacaacttgcttaccgcttcacagcatcttatgaaaatgagcaaatatctttgttatccagccagcatcttccatcgattaagtcgaacagtacaccatttccgccttcagaaagttccttctatgtagctactagcaacagaccgctaagcaaatattacacaaagaagcgaaagtcaatgcaaattgacaccaagtagctctccagtgagaacccttctatctatccaccatttcaccaacctgtaaatgctccactgcgcaccgagacggacaagtggttctactcttctatcagtaggctggagaacaaccaagcacgccttgacaggaaactagcatgtcagggtttgatcatcactaaactgacgcgcgccgtgaagaagtacgctcctccacatattttctagcattcaaccaaggaaaaaatccgcgccaacaccattctgacggggatttaagcgatacgagtctcaaccttgcttctagtctcaagttgcatgaccttgacacaaatgatatcactagtgaaccactagctccagctacgccagcaactcctaatgacgacgagtcggcttcctctgatgacgagttttagctaaagaatcactatcatgatcatctctaatatattaaaaattatggatcgcataaacgtgatataacacatataattattggttgttttaaaaaacagagaattatggatgatttatcttacatatttttggaaacaaatgttaagagggaagcgagaacaaagaacaaatctatctctttttttttgtcaaacaagatcttcattcattcaatcctcaaaagaaggaggttcatacacaaagacataagataatacaatgaaattaaagataggggcttcatgagtttttcaaagagatgtgtacttttaaaaaaagcttacaaggattgaaagattcgaccatgaagtcgggcttggcgaaatccttgcaaacaatgcatccgagcttttgatcatgtgctccacggaggaggatgttgggttggtgaggttgaaaaggaaacggtaaccaactctaaaagacatggtcataatgccgtacttttccaaacaaacagaaggttgcaaattatccaagcaaaagattaatacatgactgaccttgataattggtgtatgggtagatagagagttgtagaggcttcggtaacacctactccgtagaaatagggtcataatgccggtactcttaactctaaaaagcaaatgactatggttgggtaaactagtctcggaaagggtccaaaggaaaccaagcaaatgactatggttgggtaaattagcgtggcgtccataaccagccatatcagagacaaagggtgctaaagggagggaacctgacaggatattagcgatacttcacacgggcaacaacaatctaggacacttccaaagagaaactacttccaaactacttgagatcagactcggacaatcacgcaaacggaccacacgataagaactagcaaccaggttttgtgaaagatagcaactaatccaaactaaatccatcatcaccattacaggaaggcgtccataacaatccctaaacgatgacagtttcagaaaatttgggctgttcagaatagaattaaaacaagaccagggccttagaagacgtgggcataagtcagcagaagtctttgtgggcttcaaagctttgggtaaaggacaggagggagggcaaaggaggcttgggcttggcccaaaccgaagacccattaggtttagccaggttcttctcttcctcaccaaaagcggcggtggcacaactgaatgcaacattctggtgaccgaattgagggcttctaagactaaaacgaccacatcgagaggtgcgagtgatgaatctcggtctgcagaagaagattcttttgtgatttgaagcctccacagtttccacgtcgaggccgagctctcatccattgaggaccaaagagttgctgatcttgactttaaggaaagccgaggagagggatccacgagaatcgcgaacaaggtaagagaagagctaataccagatgggagtagtttcgaaggttgtgcggtaatgaagctttatggatctaataggagggaaaagagacgaaacaacacgaaacaaaaaacagagaaaccgatgagagagcttatgggaggaaaccggtgagaagaagctagctcctggcaccgacgagctaacgctctaccggtgccagaaaaaattgatgaaaaggctgtctcaaaaatcacgtctgggagagaagctcttgaatcttcctatctatttagaaataggaagtaatgcttaattaagatgtagaagccgagtatttccttacatctataggagatctattcaacatggactcagttagttttttttcttttttgggtattaattatattgttgttattttgtgagctaatttttcttctttctttcttttttgtgtgtgaatatcttttagtcgtctgcgtttttttctctaatttaaattgtaaaatctcttaaaaatataattagatttcgtgaaaatactaaacaatttcacatccggctagttattttatcctcagcgggaattaatttcttttgtataaattaactacaacaaattattggatttagggtctctagggaaaactggtagagagcaattttagagaatcaggattgattatctcaaggtcacttaaactggttttcaaatttaaagtttgttttatgaatctgttaatattacgtattctgcaaatcggttttcaattttgtagtactaacgtttttttttctagtctaggatcaatcatggatccatggattcagaggcaccttgatgaatcaccatctttggaagatcacaacgcctcctccacttgctccagaatgtaaaagcttcaaatggaaagtataagtcataggtaataattattttcattaaaattgttgtagtagcttgaacatgattgttgatatggttcaaatttccctagaactactctctcaaataagagatcaattgcagtatttaaggatcgatttccacaaagttctttgtcaaacaatgaattgaatgtcgagattaagctagcaggtgatgattgaaattttaagaaaacaaagtaagaaaacagcaggttgattgtgttgtaaacgattaaataaactattggttagtagatctaatgaaagctaggttgttatcaaaccattcttaaactcaaactctaattatggaatgaccggtggcgttccgcgaaacttcatatatctatagctaagaataaccggagaagccgagaaattattaacctaaatatgcattcttaacgagttcgattgttcaccttggtagataggccgattcttattacacacctacaaaccaggctcatcaaataatatatccaactacagatacctatggcgggcatatctattgtctggattcaagatctagttagctattctagatctagcattaaacacagttaaagatgaataattttacagataacctagcaaagggggcaatctactaaaccatatgaatccctaatgagaaaccctattcctaacaagcagactactcagacatattgattgaagcaaacaacatctttgagtatgaaagcataaacacagtaaatagagaagggaaaagaagggatctcttcaatgtattaagaactgtatgaatctctggaaaacaagggatgaatagcttatatctctcagtaacagggtttgcaaaaaggttgataaaaacttgatcgatgaaacttaggtctaaaacaaagtatatgaaaccctaaaaacgtccagggactaataatgcaaatagagaagtcttctggggtaaatttcctcttatgtaaacttgaaagcgtcttggacttttgttggcccaaaactggtgtcgatcgacaccaagagtgtgtcgatcgacactcctcttgattcctgagtccaaaatcgtccttagcttccttttccttagcttttgctccaaaatgttttcttatctccattgctgtcccactgcatagaatacctgaaaagacactaaaaagactcgagaaacaacataaagactcaaaattctaaccctaaatcatatataaaatcagtgaaaatagggatatatcacttatcgttttacatacttgaaatctaaacatttgatggtagtgtttatttataggcatagctcttcttttgtttttagtcctcaaagtaatcctatatattaatttaatttactattatactaatcgaattccttctggtgtttgtgtttatcaacaagataatgatggacgcatagaaggcaaaatggtgacatgtaaagatgtctggaatttctaaacgacaaagtgattgtgcatttcaacgaagatagcggtcatccaattggagattcttgtggtttacttggatcatggataggtcaattaagtcatgatctgaatttgctacccatcaactacagcaattggaggctggttaatcctcacactaaaaaaaggcatgggatgtgattgaggtaacttttaccatctatttgtttctaaagatatttataaatcgagggatgttctaagacagtattctggtttgatgatagctgtatgtgatttcatttaagcctaaattcttgtttgatgatccggcactgagaaaaggatatgtgatgggcgctctaggtagcagatgcaaggatgtaaaactacgtctttggaaagcatacaaacgaagtaatctaagtgaaacgttggagaatcgacccactggtgttcctgaagatcaatgggatcattttgctcacatgaggtttgttgaaaagtggaaggtgtagattattcattgaatatttatgtataattctatctcttcatatcaaatgaacgtaagttcttttaaatgtgagctctttcaaaatatgcaagagcagaatagaagaaaccaatatatatatatatatatatatatatatatatatatatatatatatattatgcctcacgtgtgttgaagaaagagcttttcaaggaaaagagatgagattgtaagtaacttagttgtataataaaacttgtttacaatattgatattaacgtatactagtgatgcatgtatctcttatgaagaaaatcaagactggaaaaaaccatgtcgagcggagtttttcattgagactcgcatgaaaccgatggaaattttgtatgtgaagaggctaaaacatgcgctgttagttttgataagtcaaaatccccacagcacaaacaatgttgcagatagcttggatgatgaattttcgcaagtgtttggtccagagcgtcttagacgagtttgttgtgttggtcggggatccacaccttcacagttagtgaaacgcttaactacatctagagcagagatagaaaattctgaattggtcgttgggctgaatacacaagtgaagcaattatcagatcaagttagaggactgactatctttgtccaacaaataattggtacttcaactgctgatcatgtattaatataaagatagtttctaagttaaattgcatcattatactttgatatataaaacaaatacattaatatatatttaggcaagagcatgggctacaagttttgctatagcttttgcgaacatacctaatccaatttttgcaaacaccctaaatccttctaatgctaatcaggtatatgatttttatatactaatttcgtaaaaaacctttttaatgagattgagttcgatactacgccattttctcgctttctgtagcaaattctaagtttcatacactaatatgttttttttctcgagcaataagtgatgatgctaatgttaattcaaacggtggaaacacttctaatgatcatgatcaacattagtatagcaatatttcttatcaactttcgtttatttttgttttatggatttgcattatggataaattatgtaatctattttctaatttatgtattagataaagtttatttttaattacgtttttgtttctaaaaaaggcaaccaaataggcttttttaatagaaatagatataatttcacatatgtgaataaaaataatattttcatcagtttttaaccgaaacaggtattattttacatcgccaacttaaataatataatttgtaaaatcaattagcaaaattgacacttattgatttagcttaatctcgattatttaactttttgtgtgaaaaagagctttgtgaatttgatccctaagtactacaactgacctcttatttgagaaagcggtcgagggtaatttgatccatatcatttttcttctgtcttagaaggatagtcggatgcattggatcaacaacgaggaagatcattcttctacaagtggttgggtgttcttacttaaaggaggtgccatttcatgggcatcaaagaaacaaacttgtattacaaattcgaatatggaatcggaatttgtatcattagcagctgcggggagagaggcagaatggttaagaaacttagtctccgagattcttgtggctgaaatcggtttcactcatttctatccactgtgatagtcaagctactttggctaaggcttatagccagtgtataacggtaagtcgcgatacctaggcgttagacatagcgcaatacgtgagttaatcatccattgggtgattactatagaatttgttcggagcctacaaaatctagcggatcacttaaaaaaaaggattagctagagacatggtgatcaagtaggctaaaggagtgggattaaagtccatttagactttttaattgtggaatacccaattcccctctaatacaacgttagaggctaagttcaattcggaaagcccatacttagagattgaagcactggtttatatcatcccaaagtaagtgcttcgatctccaagaaaatgttaggttaaacttttcttcttaatagatcttttgaaaaattacattttgcaggtgcaaaagattaaaagatctacctatatgagtttgaagtgtagcggcttcaaaaagctcggacttatctttgtatacactcaaaaaaggataaggacacataacttataatagtgtcaaggctaaacgcttagactagtgggtgaattcgtgtgtgttttatcttcatgtgttcaaatgagtcgaaggattcaatccgtaagatgcacatcgtcaattaagtttggatgtgtaatattactaatatgtaaattctatatatttatatttatgcatgagtttggtttatgtgtttatgtgttggatatttaagtgtaaactacttaaatcaacggttatttatttaaccattgcaattgttcattttatggttatattataaatgtacggtttcaaacatacgttataactttccgaccatatataactctgttttcttgtgttaaaaacaaagtaaacaagagagaacaagagagattcaggaaactaaagattgagagaatctttagtgaaacacacaaaacttttatttatttctcttgtatctagcctagaacaatataaagtactttgattgtcatatcttaggagatatttcgtgtaacccaaagtttgagaaggataatactcttaaagaaaaatgcttccaaacacgttttaatcattgattatcaaagttcacgttcattacatccccgagatacaatgtcgatctacaataaatgtcacaaagatatcaaaaataaaacaataatataccgttggcatgatttaaattgttggtatattttttcacttggacaatcgttcctctactgttcatttctctctctctttctgaagcttttttcaatttcttagatctactttgtttttcaccttcgttcttcatggtaggtcctagatttgcaagatgatgcaggagtgaggcaagcttacttctccgacattggagtggtgtggtttttccgtttagcgtggcagcggtggccctttcttggcggacgagaggcttctcttccaagtcttcctggttatggatgtcagtgaagatcggtggagtctttcttggctcaaccgatcggatagaagctgtagttgtggcggaagacgctgcggataggtgggtttccggtgcgtgtttgatgtttaacggcagatccagttttggatctgagatggcttatgcgggatttggttgtggaggggttgtctgagccttcacccttccctaaccgccgtgtttttgtctccatcggacgagattgaagattgctttgcttctggaagattttcagagctacggttttggaggtcagaggcttggaaatgagtggtcattttgctaggttgggggatcgaccaaattgggtggccgagagtcggaaactggatttattccgtaaagcttggtgcaggtccggtcattgataagagatttgcgtcaggattcatatgctccggtccttgttgtcgctctggtggctgtgttgcaaagtagtgggctttgtatacgacagtattattagatctgttcgctgcctccgtttcactgcccaaatccaactatgccttctctttttccggtaaccggaattttttctgttttgtaactgttgaatattgtcgaaccgcttcacgttacttatgtaaacaatttcccacatttttggttagtcttagctctaaataatatctgatataaaatagaaaaaaaaaaaaaagaatattgtatttgctaggcctatgtccaattggaagtgtgctttatatattttttttaaaaatgatttaaattgttttttttttttcgaggaaaggcttccattcaatttgttgatacgcaaaggaagaaaaagaagagaaattctcattattatcccgtgttttatactaaacttttaaatcaagtcatttctactttttcatggaaccatacgaatcgtagttaattgcttcaccaaacatcaaaataaataactgaaaactaaaaaaacaaaaagagtgacaatattacgtcttgccacaacacaacaaaacacaacctcgctcacatcaaaactctcttgtcacttctatgtcctaagaaactgagcttcaaagttagtttctcaatgcattttctcttttctttccctttccatgattttcaacaaaattataagtaaacaaatgtccacagatatttctttgtgggtggattctttgcttgtatgtagtggatttgtgttatgattctctgcctcattttcagaccagctggttaaaaggctttttgttctttctctctttataatccaagtgtcattttttcatcgaaattcataattccctttgtttttaatggaaaatagattttaaatacagttcaaaaatgtttttaaaataattgaggtctagatacgctcaacggttatgctcttctctcctttaatatctccataattgtataacaatccgtttcataggtttctcctctctcttcttcttttctccttgttaaataatattcaaatttttttccttattcagctagaaagactgataattgtactaaggttcatcagattttgaaggtgtttttttttttcctttatggcattatggtttgatctattttaatgagaatttttatttaccttttgttattttctctgttgcaggaaatgaagaaaatggaccactgatgaaagtaggaaacaaacttaatttgatagaaccatcttgatctttctttttttccacaaaagatatatttttgtcttagaaaagaaacaaaaagttggagaaatatcatgtgatttctggttgatagttggtaaaagtgtggctacaaaagaaagcattttccgagaaaatcttttgttttcttaagaaaaaatttcagttacaaaatagaaggagaagaaattgggtttggttatttagtgaccaatatagagaaaaactagagttagtatgagcatgaagtcattagaaagagtggtttcagagagagcattaaaacttggaaattcatttccatgtcaaatatgtgtagttgggtttctatgtggaatctgtctcacttcactcttcttagctgctctcacttctcttggcaccttcgaattcgccgccttctccttcacctcctcttcctctgtttttcctccttgcaattcctccacctctcacatcatcagtgagtctcaaagattttgatttttggtaacttcttatgtatgtttttttttttggtttttggtaatgaaaatttgttgatatgtagatatggttgcaagtatagaccggaaactgaaatggaagaacaaagttgagatagaagaagaagatgaagtgaaacttttggtctctgcttgggataatttattactaaatgaagaagacttcttgaagaaggtaggtattaacaaatccgatgtaccaaatggtccacatttggagaattgtgaggagaaggctcgagttagggagcgtttggatacacgtttggcgaactggacacttcctccttgggtatgcttcttctttttcttgttctttgtcatcaagcaattagtatggtgaatgaacaatcaaaagcttgtgttttagatcagtggaggagatgaagagaattatccgttaacgaggagagtgcaaagagatatatggattcatcagcatcctttggattgcggaaacaagagtctcaagttccttgtagctgattgggaaacacttcctggttttggaataggagctcagatagctggaatgactggtctactcgcgatagctataaatgaaaaccgagtgcttgttgcaaattactacaaccgagcagatcatgatggttgcaaaggtacataaaggctttaatcctttgagtcttcactctaacatatagcagcaactatcacaaattacatcttcttggttaatcttcttatcaagatgttttagacgctgaaaagtgtatataagaaccaaactttggatttgatttggtgtttctcttttgttttgatgcaggttcttttcgtggaaactggtcttgctattttctacaggaaacgtcagaagagtgtcgaaaacgagcctttgcgattgtgaagaagagagaagcgtgggagagtgggattgttacagggaaacaaaattatagcacaaaggagatttgggctggggctataccaaagcaatggggtaagccttggagttatatgaagccaactacagaaatcaacggaagtttaatctccaatcatcggaaaatggatcggagatggtggagagcacaagcagtgagatacttgatgagatatcaaacagaatacacttgcggtttgatgaacattgctcgaaattccgcgtttggaaaagaagctgccaagattgttctttcagctggagattggagaaagaagaataagaagatgaggacagagattgaggaacaggtgtggtcggatcacaagccgtggcttccaaggccaatgctgagtgttcacgtacggatgggagacaaagcatgcgagatgagagtcgcagctttagaagagtacatgcatttagctgatcggatcagagatcggtttccagagctcaacaggatctggctctctacagagatgaaggaagtggtggacagaagtaaagattatgctcactggagattctattacacggaagtggcaagacaagtcggtaataagtcgatggctgagtatgaagcgagcctcgggagagagatgagcacaaactatcctctggttaacttcttaatggcgtcagaagctgatttcttcgtcggagcattgggttccacttggtgtttcctcatcgatggtatgaggaatacgggtgggaaagtcatgtctggttatctcagtgtcaataaagatcggttctggtaactttgcgagttccacactatgtacataataagactcctctccttttttcttcatctgttgcacaaagagttttcagtataataaagggaggtttggttgacaaacagttcagagcaaccgcaaaccaactaaaccgattccgatgtgaagatttgaagatcaactgaacagagcaaagtggcttttccttaagaatttcacaaataaaaagacatcacttcaagatcaatagtaataacacaaccaacctcttctcatctcagtgacatcctgtgtcttcaggaaccaaccaaaaattaaaggaactatagcattgaaattcacaagtctcaacatctggagatgatgaagtaacacccagagatagaaacatcagagcaaagtgaatgcaatacaggtgaagaagactgtaaaatctagacgattgttaataaatataactgtagaatcagctaacaaataaagagaagttagaaaacaaatccaagctaagtatggtattcaacagaggatactaccggcttttcgtttgtttttcactttccttcctcaacaaagctccaaatgttcttctcagggactttacatttctcttctgcatgattaagttatattatgaaataataacatttgcacaagcatcaacatcaaagttttttcagtttcttttttttctaatccttttccactagttttatcttctagacactacggttttccgttgacttacctttatgaactcaaaagggagcctccagcgacgactcatcccaaacctcagcacttccattagatgcatcttcaacatcttcttccattgatagcctaatatactctctatgtgcaaaacggtcccaatctgtcaatgtagggttctctcgctcctgtttccgtttgacattagaaatgttataagacgcatgtggtggtgtgaagaagtagcaaggtaaattagatgattagtacctgacgaatgaggaatggatcccgggtttcaaatgccataaatttgttgagattaaataggatgttgaagacgtttccagagagctttgagcctttcaggtcatgcagcgttatatggctttcgttctgtggaaggaaataaaaaacaatcaaacacaaaacaaaatcacaagactcagaaagaaaactgggaacacaaactacttctgtgactatactaaatatagaaagaagaaaacaagagatatattgttgaacctcaggtccgatcatatcaatcatctgacataagatatcctcgaaaagaacagcctcttgcgccatgcactccattctatgcaactgctcttcataaaagaattgcatctcatttcgcgtaataatcccatttgcatccaagtctatgcacttaaacctagtccaacgtatacttgtgtcagataaaagacttaaaatggtatctgtctgcaactttcggacccttctatcacaacttaccaatattctaggctaggcactgacgatttatcttcttccgcaagaatgaaatagacaaagtcctcataccccatcttcccttcaactttgttagtgaacttcctagcaacctgagaagaaaccaatgcatcttaagagcaataataactttgaacgaggaaagaactcttaaaatagaagcaatataaataaaatcttcaagtagtaggcattaaagagcaaggttttttagacagaacctgggagaatattctgtcgacaatccggtaggtaagagcatggtttccatatcgcataagattttctttgtcaatcaggaaatcgtgatccgtatccagctcccagaacttgcagtatatgacatagaaatgctcatacgagaagtatctaattgccaaagtgaatagaaaagtgatgttaaatgagcaaaaacaatactataaatacaacaatagcacgcaaatatttttgtcagtacctcaacactttgttaatatcttcttcttcatcagcatgtagcatagcatcaattaagtttccccgtttaagctccctaaatgtaattcgaccattgccagatctatttatgtaataaaatattcggtaggtgacagtttcagctgtttcagcaaaatacaaattgtatcagacagaaaagcatccttaaaaatttagctttgataccggtagcagcaaataccaaagaatatggactccagatatctagaaagcaatcaaagtgttctcgggaattcattactaactgacgcatgattcataaacaagctccagaatttattttttctgatattgattatatctgcaggattcatagactgaagatgattcattccgtgcttgaaagctttatggatttgcaagttataagatgatgtctaacacaacaaaacaaagaaaccgtatcttataaaaattttaaaatccatacagagtaatgccacatttattactgtatctcgatgcatcaattatcaaaattatttatttcactagaaatattattgatgtggtaaccattcgacagatttagataagtacatggcaaacttattcactcattcttctcaactagggctgtagctaccaatatacttcgaagaataaaatgtacaatcaaactcaattactaaacaccattactcaagcaatatcaagaagaaatactattgatctggtaaccatctgacagatttagataagtacatcataccaaagtggcaaacttattcactcattcttctcaactagggctgtagctaccaatatacttcaaagaataaaatgcacaaccaaactcaattactaaacaccattactcaagcaataccaagcggaaaaagaaaacatgagataacttaggatactaaaaatgtaaataaagttgagacctaaccatatctttcttggaattc

SEQ ID NO: 1469 - DNA, 109974 bp, Arabidopsis thaliana
gaattctacagataatctagcaaagggggcaatctactaaaccatatgaatccctaatgagataccctattcctaacaagcagactactaagacatattgaatgaaacaaacaacataattgagatagaaagcataaacacagcaatagagataagagttagaaaagatttcttcacggtatttaaaactggaatgagtgtctcaagaacaatggatgaatagcttttgtctctcagtcacagggttttgcaaaagcttgataaaagactcgataaaagaaacttaggtctaaaaacaatatataaaaccctaaaaacgtccagagactaataatgcaaatagggaagtctgctggggcaaatttcctcttctgtaaacttgaaagcgtcgtggacttctgctgggccgaaactggtgtcgatcgacacaaagagtgtgtcgatcgacactcctcgctgattcctgaaccaaaatcgtccttagcttttgctctaaaatgtctccttatctctattgttatcccattgcatagaatacctgaaaagacactaaaaagactcgagaaataacataaaggcttaaaatcctatacctaaaacatagataaaatcagtgaaaatcgggttatatcaactcccccagacttagcttttgcttgccctcaagcataacacaaaagccgaacccttggaagaggttttgaaaacaaaggaactgccaacattctctagcctattgccatgatcattcaaactaagtccatatgcctaataagtctaatcaaatcctaaccaacatgtacttctctacaagcttacacaacattctagattccatacctaagttccagaactatatccaccaggctttcatagctgggtctcatcaaacaagctgacattcaagaccattctttatatatttgtttttctttttcgatgttctttctctcccccagacttattatttttagagagtaaacaaaggggaactcgcatactggatcgacaccctcgacatttttccaacctttataattgatcattccaattaaggtataataatgaggtcataggaaacattcctacccatatacactatttgaaagtcatctccatctctcattatatttttctttttataaggggagaggaacatattctttttatcacattggtctcaatatcaggtatcaacaaggagtcaagatttatgaatactaactacttgaagaggtaaaaggaagagcagtgagattagctccagccttagtggctgagttggaaactaggatatccttaagtctgttggtttgccatctagattttccaatagtcagattgactcgaacaagacaaatatagatcatgattcctaactaaactaaacaaaacgttttttttaaaaaaatttagaaaaggaaataaaagaaataaccaaatgaactgcaaaatgaaaaatgataagaaacaaaaataaaagccatattagtatgaaccccccccccccagacttaaacgacattgtccccagtggcattcaaatccagagaaagaggggaaaatgaaacaaaaataaaagaaaataaaagaaagtgaaaagaaaaatcaaaccagtgggttgcctcccactaagcgctcgttttgagtcaatagcttgacttggtggagttcaagatgtgggtggagtggtggaggattgatgctgcctcctcgccttccaaggcggtgtgtaaacggatctggctggggcagctgcaggtttcgatcgacaatcagggatgtgtcgatcgacactcatctcgtcacctgcaagaacaacaggagaaacaagctttcgaggaatctaggcttgttatcttgtgaagcaatcttcgaattatctaaagaattaatcaaaggtaaagcaggagaagagagagaagagaatttatcacataggtccttaagtggtgttggttgaagagagtgtgcagaatcctctgtctgtgaaacccgagggtatcgatcgacagggggtagtagtatcgatcgacaccgttgctctgcaactctcattggcgagctgagcgggttggagcattttgtgtggctctgtggtgggatgatcagtctgaggaggtgtatctatgcttgaagcaatgcaactgataggcttagtaagctctgaaccatccatgccaaactccatctccaaatcacaaaccttgagagagattctctctttcttcacatcaaacctagcaccagttgtagctaggaatgctcttccaaggataagaggatccttgggttccttctcatagtccaggaccacgaaatcagcagggataacagagttaccaaccttaacatgaacatcttcaaggattccttcagggattcgcttggaacgatccgcgaagagaagagtgatgcgagtaggtctgtagtgagtcatgcctagtctctcagcaaacagacttaggcatgaggttgatgatggatcccatatcacacaaaaagcggctaaacctgcttctggagatagagcaattaagaacaaagctacatggatctacaagctactcagtggtctgaccaggagtaatggtgcggatgtactcggctatgtctactctctatgccttctccttcttggccttaggcagcatgattgcactgatgtccctggtaagcagcttagcttcatctaagctaattccattgtcaacaagtcgcttgacatacctgttgagtgaggaagcagatgtctcagaagcatccttaggaagagtatggaagatcttctccattatggctttgcacttggcagcatgaagctcctgcttagaacgacgcctcttcggatacgcgacaggaggagtgtagacaggctcgggctacataggtatttgcaccttacagggtgcagtccggatccaatgtcgatcgacacaagaggggtatcgatcgacaccgtcgtattgagtcgtctctgataagagcgtcccatatggtgtcgatcgacacaggagggtgtcgatcgacaccctctctgcaactgcgagctccaactcgtctttagagtccaattcctcccacacatcatctccttctctaatcatgatggcattgcagctcttccttgggttagcatcaggattaccaggaagaaaaccctattgtctcttgatagattgtgcagttcgagctacctgtacatctagcttcttcaagtgagagctcagattgtcgatcttcccattaagatctgtgtagacagcatcaaacttgccattaaactccacaacaagctttgtttggctctctagaatttgctcaagcatcgattccattcttgtctctgctgagggtggaggggaggggggcttggtaagctgaattaccataggtcctgtgaaagcttctttgaggaaaggtcttctggaaagcaggatttggagtgtagttggaggaaccctggttccctgtaaacctgttgccactgaagttgccctgtgtttgcccaaacttcctgtatccctgaccatttatgtagaagactccttcctctaacttaggctcaggctcaatagtctcttcctcagctgcaaagtagacatgcttcttccctgtgagcaagttatgaactgaatccagcttagcattcacctctactatctgatttcttgaaatagctgataagtatgtattttgcatgttttgagcatccctttgtcatcattttagcaccatatcattactgttttataccatttctcatcatttgtcatcactttgcatgtttaggataggtttgcatgcatgttgcatatttgtgttgatttgaggtgatttggagctgttgacgagctaattggaagaagcggacctgatcatgtcaaaccactcgaccccgaggtcgagtagaagcttcaagacctcaagagaccactcgaccccctggtcgagtagaggacttctcgatttcatcatatcactcgaccctgaggtcgagtgtcatcatctccatcacctgaccaccactcgatcacctcacttgaccccaaggtcgagtgtcttcatctccatcaccagatcaccaccgcgatcacacctctctaccgggaagtcgagtatcaccatcaccaccactcgactacatactcgatggcaagcttcagagtcttcttcattccgcactcaaccagacattcaagcataagaaagaaaagaagactccagctattcactcgacctcccactcgaccacctaggtcgagtacagttcttaatccgtcccaatactgcgtcgttttaagtattagggtttcggaatattttgctataagtagcatgtaccctacattttcgagaacaagttttttttatctagttttattccgcagacactgtgttctagaccttttgtaatccggatttctctttatctattcagtatttagcattcagtatttgttcttgatttcgtttactgttgttcatcctgttatcgttttgctattacactgttgttatcgtgttttcatcctgttcaacgtttatgttctctacaatgatgtctgagtagtgaataggtttctgaggatgggttagagtagtgtagaattctcagtatgctaggtggttaagtattgattgatagatcccttctggattagttgttcttaatgcctattgctttctgatcaactggaatttgagcccagatatttctgcgcccaaaaggtgttcgatgaaatgtctgaaccattaattctagagattcgtggccctgtaccaaggtattggttgcaaggagcgttttggctttaacttgttgattcgtaatgcctgttaggttagctctcgtcaatggtgattgagtctgggactaggttaacttgagggtctctgttgcggtggcacttagatttggttaatgaacttgttgtttagggataatttattgagcatgtcagtcacctgtaaactgaggaaacgaaactactcaattaccccatcctcgagaattctttatccgattgattttattgtttactccactgctgtttactgtatcctgtcatctgctgcttagtttctacaattcttttttgttactcgaccttatactcgaccacccagttgtctggcaacagactgtgcagtcaattatctgtgtcatactgtctgtctgttactcgacctatcactagacctcacccagtgctctgcaaagagctgtgttggtcaagtgttttattgtttctgcttgaatttctggtttctgcatgttcacttagaactgctagaacacactaaaacctgttattgcttggcttgacttagtgacttctaatcacatcttgattgttagcatcacaccaatttggattgacaacctaaaatactacaacgacatgattggtgttttaggataattgatcttaaaaacctattatcaatttggcgccgttgccaattgggtgtttgtttgttacatttgagatttcagacttgcttagatagagttctttttcaatttttatttcagttactgactgtgtgtttttcttgttgtcttctcggttgaggtacacctctgctatattcaaactcgatcaacaggcaaccagaacctccttttcaacgataacatcagccgcctagctcgtgaactcagagaaaggagaaacacagtcaaccttatacctcaacaaccactcgaaatggctgacgaacaaaatcaacagaatggccctgcaaacattggtgctggagatgcaccacgggaccaccatcagaggaaaggaattgcacctcctgctatccagaacaacaacttcgagattaagagtggtctcatcttgatgattgaggggaataaattccatggtctgccaatggaggatccactcgaccacatggatgaatttgataggctcttcaacctaacaaaaatcaatggtgtcagtgaagacggattcaagctccgtttgtttccattctccttgggcgacaaagcacacatctgggaaaagaatctgccccgtgactcagtcaccacctgggatgattgcaaaaaggcttttttagcaaagttcttctccaatgccagaactgcaggactcagaaatgagatttctggctttttacaaaagactggtgaaagcttctgtgaagcatgtgagcgtttcaagggttacaccaaccaatgccctcatcgtggcttcaagaaagcttctctgctcagcactctatacagaggagttctaccacggatcagaatgcttctggataccgccaacaatgggaatttctagaacaaagatgttgaagaaggctgggaattggttgagaaccttgctcaatcagatggtaattacaacgaggactacgacagaactatcagaggcacaactgactctgataacaaatacaagaaggagatcaaagcgctgaatgacaagctggacaggattcttcttagccagtagaagcatgtgcacttccttgttgatgacgagcagtatcaagtccaagatgaggagggtaaccagttagaagaagttagctacatcaacaatcaaggtggctacaaagggtacaacaacttcaagatgaacaaccctaacctctcttaccctagcaccaacgttgctaatcctcaggatcaagtgtatcctccacaacaacaacaaggtcagaacaaaccttttgttccctacaatcaagattttgttccccagcagcaatttgaagggaactaccagcagcaaccaccacctgggtttgcacctcggcaaaaccaaggtcctgttgtacctgatgctgaaatgaaacagatggtacaacagctgctacagggacaagcatctagctccacggaaattgctaagaagttatctgaattgcattagaagatgaactgcagctacaatgacctgaatgccaaagtggaggcgttgaataccaaagtcagatacttagaaggacaatccgcatctacctctcctcccaaagttatgggacttccagggaagtcaattcaaaatccccaggagtatgctaatgttcatgctatcaacataaggagtggaagtgagttattcactaaagagagacccaagtcagtcactgaggacagtgcataccaagatggggaggatttcagtctcaataaagatcaagctgaccagccactcgaccagtcacttgagcagccactcgagcaaccactcgaccagccactcgaccagtcactcgagcagccactcgaccagtcactcgagctgccactcgaccactttactcaaccgacattcccagcaacatcaccaactgctctgaaaccagttgttgtcaaaaacaaagaaaaagtcttcattcctcatccttacaagcccccacttccatttcctggccgacacaagaaagagttagaaaataagtacagagctattattgcaaagaacataaaacaagttgaagccaggatacctcttgttgatgctctcacgcgtatcccggattccgaaaaattctttaaagacttgatcatggagagaattcaagaggttcagaaaacaacagttatgagccatgagtgtagtgccatcatacatgagaaagatgaaccagagaagctaggagaccctggttcattcactctaccatgctccctaggttcattgacattcaataaatgcctttgtgacctaggaacatcagtaagtctaatgccactctcagtagctaagaggttaggttttaacaaatataaatattgcaatatctccttgattttggctgatgggtcggttagacaacctcatgggttattagaagatttgcttatcaagattggaaatgtggaggtgcctacagacttcatagtgttgaacatggatgaagaaccaaaagatcccttgatcttaggaaggccctttttggctacagctggagcaatcatagatgttaagcaaggaaagattgatcttaatatgggaaaggattttaaaatgaagtttgacatcaatgatgctatgaagaagccgacaatagaaggacagaccttcttagttgaggaaaaggatctgctagttgatgaacttctagtggaacttaaagaagcaaataactcaaaaactgttttcaccaagagtggtaaagctgggtatctccctagtgaaactttgagttctgagaagtcattagactcacacaaggcaacagttggctcaaaggtttacaagggcttgatggggtctgacacaaaggttatgaaagctaatgaagtaagttcaacacatgctcgaccaactgattccaccaacaactcgaagaagcctccaacttgccatgaaagctcatgctcgaccaaacaactcatggcaagcactcatacgtcagatgattggttagaactcaaggagagatctaaatggcaagacaaagccatacaagagctaacacatattgtgaaagagctgaaggatcaaatcaaggagctcaatggaaaagccaaccaagtaccactcaacatcaaggatgcccctcacgatggagccactattcttgtcagcaaagaaggatgtgaattcacatcggaatggtgtagaggagaagactatcttgataaaaatgaagcttactgtgaggacatagcctttgagtacccaattgcagacctgtcaagaaaccctaatgagtatgatgatcactctactcaagaaggagaggagaccacatttcctctctgcaacccaccctaagcctaatgagtatgagaagtcaagcttagagacttaaaacaagctcacttgggaggaaatcccatgtctatctttgtacatatctttatttttccttgttgattttgatgcatttggttagtgtattcaggagataagtataaagagccgagtgaaatggattatgactctacgagtaaagcagtatactcgaccataaagcaatgaaaaatactagaccatgttttagcttatccacgccaggaggtcactcgaccgcggtgctggccgcagcagaagaagggaggtctagtatactcagggcggtgctggccgccatagagctgatgaggtcgagtacccacctgctggagctgatacagaacagggcggctcatctatggcctgggatcaatcacaggcagccattgacgaccaactccgttcattcttcgactgaggtaagcgcctcacttcaccattgtattatatcatttgttgtgatttgttctttattttgtttctgtgattagatttgtcctgagtactctcttccaagtttattcacacagtggactgtgtgatttaagtttgggggagggctcaggaagtgtatgttgcattgtgtatatttttgagtctgcattcatctataaggcatagaaaaaccaaaaaaaaaaaaaattgaaaaatttcagaaaatgatttcacaaaaaaagagtgttcatatagttgcattacatttaggatcgagtctagagtgtttcatttaggattgttgcatatgcataggggataatgatgagatagccttgtaagcattttggttcaccggataaactcagttccttcattgctagttgtttgttgcgtagtcaatgaatttgaaataaaactgaaccatgcctagattgctctactcgaccacactgtcatgatctgataccattccctatcaatttgaacctgaatctgatctttaattatcatgtctgcatcaaatttgaactcatggataccctaaaatacttggattttcttattcattttgatcactcttgttaatccaagtagctgactcttcttatgagagcagttaacccaaacccaaacttagactttctttcaagccatgtatcacttgtgagtgtttgtgaggtcgtattccgattaagcttggtagaaagtgttaggttcgtaacgatagagatagtgtctcatgtagttctagttcacatttttcagactagatatgactaggtgggcgcttatactttgggttgggatgtgtttaaaagaagagaaggggttgattcattgatgataaaaggtaaaagactctaggtgaagtaagctaaagaagcagaaaaagtctagtaaaggttttgggatttgtaaagaaaagaaagagttcttgttagctattgaagatgggcaaaagccctcggttttaaaatgttaaaaataggaaccttagttgttaaagaaatccaaatccgctagatgtatcaaagtattgagaaagcttctcctagagttaaaagaaaagaaaagaatgattagaaaaagggcttaaaggattcatgaatgcaaagggtagagttagggtcttatattgggattaccattagaccttcatttgatatactctgggtagatgggatcttatctctgtatgcatagcttgggacttacctttagcattctactaaagcttaatcaatttttgagagatcccctgttactgaagcctattctgtaagggaccatctttgtctcttgaccttttgccttagccaaatgagttcattgatgatgcattgtttgaatcacgttcgagaactaatgaatgttaaacggattggtagattttaaaacatgtgtaggtcgagcatatgagtcggattgattgataataaggcatggctaatgtttttgagtagaattcgaccatatcgaagcttagaactatcaacttggacattgatttcatcttgtttatatggtgctttggttctgagtccccgctttcaaacatcgcctctagcttgttcttgattgtttgcttaagggcaagcaaagactaagtttgggggagttgataagtgtgtattttgcatgttttgagcatccatttgtcatcactttagcaccatatcatcactgttttataccatttctcatcattttgcatgtttaggataggtttgcatgcatgttgcatatttgtattgatttcaggtgagttggagctgttaacgagctaactggaagaagcggacctaatcatgtcaaaccactcgaccccgaggttgagtagaagcttcaagacctcaagagaccactcgaccccctggtcgagtagaggacttctcgatttcatcatatcactctacctcgaggtcgagtgtcttcatctccatcacctgaccaccactcgatcacctcactcgaccccaaggtcgagtgtcttcatctccgtcaccagatcaccactcgatcacaccactctacctggaactcgagtatcaccatcaccaccactcgactacatacttgatggcaagcttcagagtcttcttcattccgcactcaacccgacactcgagcataaggaagaaaagaagactccatctattcactcgacctcccactcgaccacctgggtcgagtacagttcttaatccgtcccaatactgcgtcgttttaagtattagggtttcggaatattttgctataagtgttggtgtcggatcccgcaccatgggctcgggaccggccaaagattgctacacaagtatgggaggcccataagatgaaaagcccgtaagattcttcaaagtaagagtatgggtgagatgtcgattggcgaagtgggtgcaacatcgaagttaggactactcgaattgaagaagacaaatgggccgaagggtgaagtccaggaggcccggagtggtttcaaattcgaacgttgaataattaattcaaagactagaaacggatacatttaaggtagaataattgtgtgtaaatgaggattaaatgtattctttgggtataaattatgggtcaaagactatgtaaagacacacacatttttgtgcaaattagctatacacattttctctacaaaactcacagttttctctataatcatctatctattttctagtatatttgtcctcaagaataatccttctcactaaataaataaatacttgagtatgtgaatctaacatccacattttggcgccgtctgtggggacggaggattcttgagtcgtcagatttcttctgtgtattacataaccgaagtaagccgcaatgtatggagaggatgctaccaacgcttcgatagccgaaaccctcaagaccatgcaacaaactatgggatatggcgcagaagttttcaaacgtggaaaaaaccgtcgaaacactgcaaacaacccaggtatcgcttagccaaaatgttagtaccattccgtctcatgtccgttctttaaatgcgggaaattctactagagttcgaaggactatcttcggatccccaaactcccttccacgaaatgcaacaagcgatcaaacgaccctggatggtacaaacgcgaatagtcaaccggaatatggagaaacgcatcctaaagatgataaccagttcgatgatcagcacgagcaagaaaactttgatcagctcgaaaccatgagagaagtaagtcgggaactcaaagaaatgaggtcgaaattccatcaagctacaagttcggagccagacatcaaccaagttatcgaggaggctaggcgaacaccgttcacccgcgaattgcgagtttgagaatcagagattatcaaaaactcaacttagaaccatataatggtttggaagacccgaaaggctatctcgcagcttttctaatagccgctgggcgagttgatctaaacgaagccgatgaagacgcagggtattgcaagcttttctctaaaaatctatgtgggctagccctgatgtggttcactcagttggaaccaggatcgattagaaatttcaacgaactatcggcagtatttttaaaacaatactcaattctgatggataagagcatttcgataccgacctctggaatctatctcaagggccgaatgagacacttcgggcttttatcaccaaatttaaaaacgtgctttcaaagctcccaaggatctcacaacagtcggctctatcggctttgcaaaaaggactatgtcatgattcgaggtttaaggaagatctaatacttcataagcctgatactattcaggatgcattgtttcgagcaaacaattggatggaagtcgaagatgaaaaagaaattttcgcaaaaagaaataagcaagcaaaactagcggtcacttttccaccaaagaagttcgaacctcgggaaaatcagggaccaaggaagtttggttcacaaccattcaataacaacgtcggaaagcagtttcaggggaaaggaaggtcaaatacctgggtccgagatgaaacctcgtactgcgatatacatagagtcacaagacatctgaccaaagactgcagtatccttaaaaggcatatcgcagaattatgggccagtggagacatttcaaaattcaacatggagaactttgtcaagcaatatcatgaatcaagggataactcagaggctcaaaactctaaaagaccaagaccggctggcaaagaggaaccaagaactttaaatggtaaaataaacgtaattcttggaggatctaaactctgccgtgattccattagcgcaatcaagaaacatagacgcaatgttcatctgaaatcaagcttaagtgaagaagtagactttcaaggcacttcgatattattcgaggaaaaggagacacagcatctcgaaagacctcatgatgatgcacttgtaattacgttggattcgaagtatcgaggatcctcattgataccggtagttcggtcgatctaatttttcttagcactttggaaaggatggggataagcagggccgacgtggtaggaccgccatcccccttagtggcttttacaagcgaatcgctaatgtctctcggaacaatcaagctaccagttttggctggaaagatctcgaagattgtggattttgtcgtttttgataaaccagcagcctataacatcattcttggaactctatggatctaccaaatgaaagcggtcccctctacttatcaccaatgcctcaaattcccaactccgagcggagtggaaacaattcagggagatcaagaagcttcgagaacttgttatttagctagccaccgattaaaaattcaatagcaattaacgaagcccgcaaagaaaggagtagtcccgagattccctagcgggcagaaagtggatgatgtcgtggtcgaagtaattctagaagcagacaaaccggatcagaaagttcgaaacggagctaccttatctggcgaggtgaaggaagccttagttgaactgttaaaaaggaacaagaaatcatttgcttggtcggcagcagatatgcccggcatagatccaaatataatttgtcacgagttgaatgtggatccgagcttcaaaccggtaaaacaaaaaggaagaaaactcggattggagagagcaaaagcagtaaacgacgaagtggataaactcctaaagattgggtctataagggaggtgcaatatccggattggttagcaaacaccgttgtggtcaaaaagaagaatggaaagaatagtgtgcattgactttacagatctcaacaaagcttgtccaaaagatagtttcccacttccacacatagataatcttgtggaatcaaccgccggaaatgagttgttgtcctttatggatgctttatcgggatataaccaaatcatgatgaatccggaagatcaagagaaaacttcgtttatcacggataggggcatttattgttacaaagttatgccattcgggttgaagaacgcaggagcaacttatcaacggctggttaacaagatgttcaacgaacatctaggaaaaacaatggaagtctacatcgattatatgctagtcaaatcattaaaaaaggaagatcacgtgaaacatctagaagagtgttttgcgattcttaaccaatatcaaatgaagttgaatccggcgaagtgtacatttggagtcccatccggggaatttcttagctacattgtcagaaagagaggaattgaggcaaatccaaatcaaatcaacgcttttctcaacatgtcatctccaaaaaattttaaggaagtacaacggctaactggtcggattgcagcattgaatcgttttatttcgaggtcgaccgataaatctttacccttctatcaaatcctaaagggaaacaaggaatttctttgggatgagaagtgtgaagaagcgttcagacagctaaaggcgtatctgacttctccacccgtattgtccaaaccagaggtagacgaaaaactctatctatatgtctcagtttcggaccatgcggttagcggagtcttaatccgagaagaccggggagagcaaaaaccaatttactacataagtaaatctatgacggatcctgagataaggtatacgatgatggaaaaccttgcacttgcaatagtaacctcagctcggaagcttcgaccatattttcaatcccatccaatcgaagtattatcaaatcaaccacatcgaactattctccatagcccgaaccagtccggtagattggcgaaatgggcggtggaattaagtgagtatgatatagagtacaagagccgagttgccatgaaagctcaagtccttgccgattttttaacagagttaccggtactcggagggcaggagcaaccgccaaatcagacttggaagttgcatgttgatggatcgtcatcaaaaaatggatccgggttgggaatcaaattagaatctcccacttcggaaatccttgagcagtcatttcgattgttatttactgtatctaacaatgaggcagagtacgaagcattgattgctggacataggttggcacaaggagttggggccgatgagttggtcgcctactgtgactcgcaactagttgttaaccagttcaatggtgactatgaagcaaaagaatcacgaatggaggcatatcttgaggtggtcaaagacttggctaaaaactataagaagttcaaactcattcgcataccacggggagaaaacactactgcagatgcactagcagccctggcatcaacatctgatcccgaagtcaaaagaatcattccagtagagtgtatttcagaaaggagcattaaggacgaaaaggaggcattcgtcgtcacaaggtcctgagctgcagcccgagatcgcggcgaacctgttattgaattaccacctgtcaaaaggcgaaagtcaaaagagacaaccatacctaagcctactgtgcaagaagatagtggactcgaagaaaatgacgaaccaatagaagaaatcacctcggacaccacagtcgaagctagaaccgaaccgtgggttgatgaagacatactagcgccaaatgagcatcccgaaccagaagctcggatatttcacgaaatcgaccaaattccgactaaagattgggggctgattggagggagccaataaagcattacatcgttacaggcgagctcccaaaaaatagatggcaagctaggaaaaatgagaatcgttagcgcaaaattttgtctatcgaagaattcttttcgaagtggtttgaagttgaagcgtatgtaaacattaaagattcggcggtaaagactttcatttggcagaatatcatatgcaggtttggcgttccatacgagatagttactgacaacggaccacaatttatctcacacgagtttgaagcattttgctcggatttggggattaaggttagttattccactccacggtatccacaagggaacggtcaggctgaagctgcaaacaagacaattttaagcaatcttaagaaacgtctaagtcatttaaaagggggctggtatgacgaacttcagccatttttatgggcatatcgcacaactcctaggcgctcgaccggagaaaccccgttttcattggtgtacaggatggaggcagttgttccagctgagctcaatgtaccaggacttcgtcgaacataagctcctctaaatgaagaagagaattctgcgatgctccacgactcgctggataccatcaacgagaggcgagatcaggccttgatccgaattcagaattatcaacatgcggaagctcggtattacaattcaaaagtcaaaagcagacctttctttgtgggcgattatgttttgaaacgtgtgttcgataacaagaaagaggaaggagcaggcaaactcggcattaattgggaaggtccctacattgttatcgaggtggtctggaatggtgtttacaaattgaaagatttagaagacagacagtccaacgtccttggaatgtggtgaacttgaagaaattttatgtttaaaaacacacacgcattctttgtacatgaactacggtgtggcttgatctcgaaatgggtatgtaggcatctcggaaacgagttcagctattaataaaatttgttttattcatgttgaagaatagttcgattatacgtacgaataaaaataaggagttcgactatgcgaacatacaaagcaggaagcaaggataaatttattcaaagagaaaacaaagaaaagacgctgaaatcttagaaacacttcggattaggaaatccttctcatcttgcagaacactttgatcccttgactggcgagatcaagaatgggcatcatacaatccgggatgcgggcaaattcagcgattccaagtttgatccaatctccggggtgagagttgagggtgtgtaactcctttgatatcacattgactgtaatgcccctgaccttgactatacggccggacgtgcagtctatcgagtaaaatgcgagatcaagccaagaaaaggcaagatcagtttggccatttgatgtggcaagtcatgggtaaggagcattgcaatggatcaagtctacgggtaaaggaatgactctccaacagacggactaagcttagctacgatgcgactatcggtaaacctcgaaaccattaagctagcccttagacctaggatagcttaagaaaaccttagttttaggaaaccttagaaggactaggaaaccttagaaggactaggagaccataggggaatccatttgggcagtgggatatgagtatgggtcgtgaatggtcaaggtattgatcgaagaatgcggataagtgacgataacgagcttacttggttaattatggcatggaacgtgttatagacctaaggaagccttgatttatgtcatggagcatcatgagacattggagatggagtgacccctatcaatgctcttgcggtccagtgacagatcgtgggtttcgccggaatgaagaaacggacggccaggattgaactgtggctcatgtttatccgttaaggctcaagcttatccataattctggtcatccttatcctttagggtcgagcttatccattttggatgatgtttatccggaaaaaatggaggaaaccaatcggagaccgattagtgtcccggagcgtccgtggagtgacatttatcgaattttgattggtccgggccacctcctacttgttttggccgaccttttgaccgacttaagaccctataaatagtccacttcgtcccatttgttcctcagacccaaaatccactagaaaacgcctagctcgcgggagaagaccttagaagccaaacctctcggaaatccctgtgagtacttgagtcacgtgaagtatcacgtgaataggatagtgtattcgtttatttccttaatatagcttaggaggttaattaggattagttagcttaattattcgcttaaaacctgattaggatagttaattaggtttagtaatatttaattaggattagtgatgcctaattaggattagtattctctaagcatgattaggactagttaaacctagattaggggaactaaccgcgattagtggtaattaagtacgattaattgtttgattagtatagttttgcatataggatagttgcataatagtatatgagtctgttgtcattttagtagtctttaattagatgactaacattagacgaaccatgaggatcccgtccgtatgttgtgcgttgcgtgtaaccccgttccgttatggcatacgaaggctaggggctggatcgctaccgaccgggcgctacatgacgatgtagtattaaggaatgctatgtctcttgtagactttgtgtctaagagatggaggcatgtcctgggagatcatggattcttagaaggccttacctaggtttttagaagcatacttgcattagttgtccattgcatattaggaaatcgagtctgcatgcatttttctttgtccattatgtcttgcttgttgcgtgttttctttgtctttgtgttatttgcattattcgtatttattcttcttaggtcgtagtattagtatctgtcgatgctgcttagggtagaggtattagggtagttctgtctagatccggggctcattaagtaatactagattacttatgatgctactttttgtgcaggaaaccttagttaaccaaccttgtagaggccgctcgtgacttaggacaaaccaatgtagattttacggctttttgtaagatcttactaagtatattatgtatggtttttaaagaggatccgaaaactatatatgttttggtaaccatttctcgtatgatatatatataagtataagattcggatttctaaagttatatggttatactcactgatattattagtcttgtccggactaacacaactcacgtccgcagtacgggttgaaaagcattaggccacgggcgggaagctagactcttgtggttggacgactcgggcatacgaatttgttttggaaacgtgggttgaccgactgcgggcgtctaacataccgcttctatttcgttgttacaatgaccctccgcaacatttggttgattttctttcgaagtttcttcttttccgttgaacgttttttgtgttgagctgcgagagctttgataaaggccatcgcgatatcttgatctctgctcgaaaggtccttgattaatgcacctggagctcggatctgggatctaaagttgtgaagtggggagcatcggaagttgattaatgtcctcgtcgatcatcttgatcctcgaaaagtctggcatggattctgagcatcgtaggttgaaggccataactgcacaagaaaaggacaatacttttagtgaggaatgaagaaaaacctagaggggtaatttatagggaggtttcttagctttcaaagatgcgattccatttaaagccggagtgattcgcggaagcattcacgtcgccttgttcgcccagcattcaaagagtatctccaaaacgaatatttgatgaatcaaggaaagttggaaagtttccttaaataaaatgggccgaagcctagtaggtaagtccatgcgaaaataaaaagagtttaagtttcagggaacatttagggaaggggctcaggaacaggctcctttatcgccggttcggggttcgaagtggacgcctcgtttttaacattcacgtcgggttcattattcacgcgcttccaagggttgctatcctccacgtcgtcgtcacagtcctcactgtcaaacaggatcacttggaccggagcgtttacaggaccaggtacttgacctcgagcacaaaagtacatccggagcatgtgcgggatctttgccacgcagtcgaagttcctccactcccattaaaaatggtcgctctccatagcccttaccttcctttcaatatgggcaattcgggccttgagcgtttgcctcttgaggcccaaacgttgcctttcatcgcataagcggcgatgcttgtcaacgacctagaatgcgaactggttaaatacgagtaaagtttttccggaaaaaagaaggaaggaggatttaccttatccataaaatcgtacgcctcctttttgtctttcgaggggaaggggcagcaggcttgaggaaagagaacaccggcgggctcgaagccattgccggatagaaacaatggacttccgggatcaaagggacagacggtggaggctctttcgttttctattctagaggtgtttaccaagtaaatttctgagatcatattttgagagagttgtgaaagtttatgttcttatttatagtggtttagggtttactcgaaaccacaaaattaataatagtggcgtgtccgaatggatttaaccatttttgggattcgaggaaaaggcaattattgccttggaggcgtgacacttttcttggtttgcgaggaaggaaatggcagccatcgcatttaagacaagcggatcattaaataaagaaaatatatatatattaacaaaggctgaagcccagtaaataagtcgaacagactaaacccgagttggggagttcgcggattcaagtccgcatttcttagagataggtctgatcaacctacgaatctcgtgacttgacaacatggttaaacaaaaatgctatataaaaggtggagtttgccaatccatacttgaatcgagcgcaaagaaaaccctcttgggttcatagtcttaaaaaataataataaagatttaaaagcctcctcaggccaagtatttgtttagcctacttaggcaggtaaaatagtaatagtaaacttttagtctgttaacaaaaagggacaatccccattaagtggacacagccactacaggttctcaggcacctcgagttcgggttgagctgactcaggatcaactaaatcggcggcagctatctcagtctcacccggctcgccagtagtaggctgctcgctaggaaccttggaatctgaaccatcatcgtcctcgatgaccactgtctccgagttcgtggatggaggaatctctggcggggtggttaccgcctccggaattgtcgtcggcacgatggatgcttcgagctccacgggatcgctagcacctgaggcaattatctcggattaggaaaaatacaagagtaattcgctgtgtattggtttcaaaagtttaggaatgtaccagcccaatctaaacctggcatcatttaagaacggagatcgaactcaagggacgaagatttgtctttccacgtcataacctccttttccctgtctagcaacagtctctcgtagtactcaatcatgtcattgagttcgccgtttgcctgaaccaagtggtaacaaaaaagagttagcatctaagtggaggattaaagtttaaagaattattatgggtgaagagaactaacccgagatgagtgatgggcatggagtaggaattgcttgcgaattgcaggacgccacctatcaaaggctggcaggatggtgtcttttcaagttttgaagcaccgaaagacgtttccctctgttttcatcgctgttagaataaagaaagggttggaccaggcaaggagcgttaagtcaattaatcgaaatgataaggccggaaaaaaaaataaaaggtaatttctaacccgtgaacgacttggtctgaggaacaaaaacagccttagttccggcatctcggacctcagcttcttctcaccgggggtttgcactctgatcgtccttttcacctctggatccagacaaaggagatacggtgactggaggacgagggcccatagagcggggtggtggcgatggccgaggagagcgatcagttcgggctctcgtcttatctcttttgggggaggagctaccccgggttgatctgtctctctatttccgaatcaggtcagcaagcggctcgctgcttagtctagttcgggaggcaggccgaggtgattcgcggcgcggtgatcgttctctgcgggatgactggccgctatggccttcgcggtgaggaatgggtctgtaggcaccagcagattttgccccttcggcgctgccattgtcaactagcaaggttctgctatattctttcttgtcgactgcggattgaaggaatgatttgttcgttttgcaagcctccacgatcgacttggatagcgtcttgcgtcgagctgcgatgacccgagcagaagtcccttgaggtaagggagggggcaatggcagttggagaagatgtccaggggggctcatgcttagcttgtggttcgcctctacgaatcggtcgagagtaaaggagttccagagagttccagagagtttccccttcggcgaattcaacagtcggaagggtcggtgcgatgaaagctgcgaattgaaaattaagagttggtcagataaggcaagaagtaaataagggtcatatgcatgacctaacatctatcgggcttagtagtccacttcgaggagagcaagtccgaaaggtttccaatcgaagcatggctctttttgattaagaaccacgagtgatgccagttctcgtccttattagggagatgcgagatgaggttcctgttggcgttcagataggccgagaagtatcctaccttctttgaagaactcctcacactgagaagttcaatcagttcgggaaccccgatgacatatctggcttcctccgcgacagtgataatccccataatagtccggaggaggttgggggttaattggggcaaggcgatttcaagggctgacaagtatcgaacgagggcttcgggaaggggagaagtcaagccgcaacccttgaaatagatctcgtatacgcaaaagaacccgggacggtggttctccggcgactcagtgggctccggcatttgcgagtccttcataacttcagccggaatccgacagagatctcccaatcgattaagagattggagagtgcatgtggtttgatagtggggactggcgatgtcatttggccggatgcaaaggtcgttactagagccgacatcatcgaaagaggaggattcaggtctttcaatttcagaattcatcgtgtagtgaataaggggattgaaggttcggagagagaaaaaagaactttgctttgagagtgaaagcgtgaaaaataacaaggaaagagtaaagtgaatttacctttacgtttgccagtgatgatgatggaaccgtcttgggagtcgtggaggaagtggaagagtttccccgctttaatagttaataaacaatatacggtcataattgtgacagatgtaacgcgagtaattgtaggagtttccgagatcaaagcaataacgtgatttaggcgggaaatcagagagtcatttggcgcaatctttgcttctggaacattaaagtcctccgaactggagtatcatttcgaaagacttggggggctaattgttggtatcggatcctgcaccatggactcaagaccggccaaagattgctacacaagtaagggaggcccataagatgaaaggcccgtaagattcttcgaagtaagagtatgggcgagatgttgattggcgaagtgggtgcaacatcaaagttaggactactcgaattgaagaagacaaatgggccgaagggtgaagtccaggaggcccggagtggtttcaaattcgaacgttgaataattaattcaaagactagaaacggatacatttaaggtagaataattgtgtgtaaatgaggattaaatgtattctttgggtataaattatgggtcaaagaccatgtaaagacacacacatttttgtgcaaattagctatacacattttctctacaaaactcatagttttctctataatcatctatctattttctagtatatttgtcctcaagaataatccttctcactaaataaataaatacttaagtgtgtgaatccgacatccacaataagtagcatgtactctacattttcgagaacaagttttttatctagttttattccgcagacactgtgttctagaccttttgtaatccggatttctctttatctattcagtattcagcattcagtatttgttcttgatttcgtttactgttgttcatcctgttatcgttttgctattacacttttgttatcatgttttcatcctgttcaacgtttatgttctctgcaatgatgtatgagtagtgaataggtttctaaggatgggttagagtagtgtagaattctcagtttgctaggtggttgagtatggattgatagatcccttctggataagttgttcttaatgcctattgctttctgatcaactggaatttgagcccagacatttccgcgcccaaaaggtgttcgatgaaatgtctgaaccactaattccagagattcgtggccatgtaccaaggtattggttgcaaggagcgatttggctataacttgttgattcgtaatgcctgttaagttagctctcgtcaatggtgattgagtctgggactaggttaacttgaaggtctctgttgcggtggcacttagatttgggtaatgaacttgttgtctagggataatttattgagcatgtcagtcacctgtaaactgaggaaacgaaactactcaattaccccatcctcgggaattctttatttgattgattttattgtttactccactgctgtttactgtatcctgtcatctgctgcttagtttctgtaattcttttttgttactcgaccttatactcgaccacctagttgtttggcagcagactgtgcagtcgaggatctgtgtcatactttctgtctgttagtcgacctatcactcgacctcacccagtgctctgcaaagagctgtgttggtggagtgttttattgtttctgcttgaatttttgttttctgcatgttcacttagaactgctagaacacaccaaaacctgttattgcttggcttgacttagtgacttctgatcacatcttgattgttagcatcacacccatttggattgacaacctaaaatactacaacgacatgattggtgttttaggataattgattttaaaaacctattatcaatagctccagcaatcttcttcctctcaaaatcagcattcttggtactgttgctacaagcgaggttctctattagggttgtacgtcaactgggtaacgtgtgttgaagttaccattgctcgctacatttagagccatctggtatctccaatcaactcctctgaagaaggtacttagaagttgtacctcactgaaaccatgatgtggacaatctcgttggtactgcttgtaacgaacccaagcagccttgaaagcttcagctggaccttgtgtgaaggtacacagcttgtttctcaactcctcagacttagcatcattgtagaaattcttcaagaaggctatcttgatgcttctccaagtcttgagggaacctactttaagttgtttcagccaagtagctgcttccccagcaaatgaataagggaagagcttgcaaagtaggtagtcctctgagactccattagccttgatgctcagaacaaggtcctcaaatctctcgatatgatccattggctgctcatgagataagccatggaaaggatgctggccaactaaagcaaagtagccaggcttgaactcatagtcgttcctctggaatggtgggggtacaatcgctaaacgattagcatagaacaagtctggcctgttgaaatccccaagagtacgacgtggttccgcagctggaggaatagctgaaggaatctggtgttggtgtcgatcgacacctctgttgtgtcgttcgacacccagttggtgtcgcccgacaccgagccctgctgcatctcttgcagctaattgcgcattgaggcgcgcttgatcctcattggcgttctcatgtaggataagtccatgatcatccaatctctgaccaacttcattgtaggcttgcccatccacatctctcaaaactccttctgcatcagctctgatgactctgtcagccattgctaatttctgagttttttggtttgtgcgttcaagttttccaaagtccagaacagacaagttgataagctccttctgttttctgctccttgtttgccaaggcatagacatgaaacgcagaaaagaagaaaacaagaaacgcgtgagtaacaaaatagaagtaaaaactagacgaaatctctaaacaaaactcaatgatgattccgaagaacttcggcaacggcgccaaatttgatatgattcaaattacctagaattactctctcaaataagagatcaatttcagtatttaaggatcgaattcacggagttattttgttcaaacagtaagttgaatgtcgacattaagctagcagggtaatagtgaaaataaaagaaaacaaagtaaaaagacagcaggatgattgtgttgtgaacgatttaataaagacctaggaacagggtattctcaggaaactattggttagtagatctaatgaaagctaggttgttatcgaaccattgttaaactcaaactcttattatggaataaccggtgggcgtgccgcgaaactccctatatctatagctaataataaccggagaagccgagaaactatcaacctaaatatgcattcttagcgagttcaattgttcatcttagtagataggccgattcttattacacacctataaacttgactcatcaaataatagatccaactacagatacatatggcgggcatatcaattgtctggattcaagatctagttaattactctagatctagcattaaacataattaaagatgaagaattctacagataacctagcaaagggggcaatttactaaaccatatgaatccctaatgagaaaccctattcctaacaagcagactactcagacatattgaatgaaacaaacaacataattgagatagaaagcataaacacaacaatagagataagagttagaaaagatctcttcactgtattaaaaactggaatgagtctctcaagaacaatggatgaatagcttatgtctctcagtcacagggttttgcaaaagcttgataaaagacttgataaaagaaacataggtctaaaaacaatatataaaaccctaaaaacgttcagggactaataatgcaaataggaaagttttctagggcaaatttcctcttctgtaaacttgaaagtgtcatggacttctgcagggccaaaactggtgtcgatcaacaccaagagtgtgttgatcgacactcctcgctgattcctaaaccaaaatcgtccttagtttccttttccttagctattactccaaaatgtctccttatctccattgttgtcccattgcatagaatacctgaaaaaacactaaaaagactcgagaaataacataaagacttaaaatcatatacctaaaacatagataaaatcagtgaaaattgggttatatcacccatctgtgggaaaagacgctacccgagcgatcaatcacgacctaggatgactgcaaaaaggccttcttggcaaaattcttctccaactccaggactgcaagactccagaatgagatctcgggattcactcagaagcaaaatgaaagcttctatgaagcttgggaacgctttaagggttatcaaaccaaatgccctcatcacggatttaaggaagcttcccttctcagcacactttacagaggcgtcctgcctaatatacgtatgctccttgacaccgcatccaatgggaatatcctgaacaaagatgtcgaagacgcatgggagctagttgaaaacttggctcagtcggatggcaattacaacgaggattatgacagaagcatccacaccaactctgaatctgatgacaagaaccatcgagagattaaagctctcaatgacaaaatcgacaaactcctccgagtgcaacagaagcatgttcacttcgcctctgaggatgaagtattccaaatccaagagggggagaatgatcagtgcgctgaaatcagttatgttcgaaaccaaggcggctacaacaaagggtacaacagttacagacccaacccaaatctgtcatacagaagcacaaatgtcgctaatcctcaggaccaagtttaccctcagaagcagcagcggcagaacaaaccaaaaccgtttgttccttacaaccaaagccaagggttcgttcataagcaacagttccacggagggtattaacagcaacatccagcaccagcacttcaggaatcagacatgaagaatatgctccagcaaataatgcaaggccaagccgcagaagtaatggaaaatgctaagaagctggctgacttacacaacaaaattgacaaacagttcgttgaaatgagtagcgggatcgaatcattgagcaaaagggtacgacatatagaaggcacaaccgcttctacatcagccacaccaggatacatcacaggataaccaatacataattcaaaggagtatgcccactcaatcactctaagaagaggacgagcgttgccaccaaaaggagagcctaaccccaacactgaggacaatgtggttcaagagggggaggatttttatcaagacgatgttttggctgacaaaacaatcgaagagcccactctcaccagtcaacccactcaaccacgagtcccaccagctactccctctgttgaaaaactggtagctgcaaagaccaaagacacagtctttgtaccaccgccctacaaaccgccgcttccattccctggtcgtttcaaaaaagttctgattgcaaattaccgtgcttttttggaaaaagagataaacgatcttgatgtcactatgcccttggtagattatttcgcgctgatacctgactgtcacaaatacgtgaaagacctaatcacagaaaggatcaaagaagtccaaggaatggtggtattaagtcatgagtacagtgcaattatccaatagaaggtcatacctaagaaattggaagatccaggctcattcactctaccatgctcactaggccctttagcattcacaagatgcttatgcgatttaggtgcttcggtcagtctgatgcctctctccgtagcctagaaacttggttttgataaatataaaacttatagcagcttttttcaaattcctatccacccaaatgaccaagagaaaactacattcacgtgtccctatgtgacttttgcttataaacgaatgccttttggactttataatgcacccgccacttttcagcagtgcatgacttctattttctccgatttgatagaggagatggtcgagatattcatgaatgatttttctgtgtatggctcttctttctccttatgtttgcttaatttgtgcagggtacttaagagatgcgaagagacaaacctggtgctgaaattggaaaaatgtcacttcatggtcatagaaggaatcgtcttggggcacaaaatatcagaaaatgggatagaagttgataaggcaaaagttaatgtcatggtgcagttgcagccactaaagactgtgaaagacatcagaagttttctcggacatgctgggttctacaggagattcatcaaggatttctctaagttggctagaccactcaccaggctgctatgcaaagaggctgagttcacgtttgatgaagaatgtctggttgctttcaaattgatcaaaagaatcattgatctctgctccaatagtccaagcacctaattgggatcacccttttgaaatcatgtgtgatgcttcggattacgctgtgggagcagttctaggacaaaggatcgataagaagttgcatgtcatctactacgctagtagaacgatggatgatacacaagtaaggtatgccactacgtagaaagaactataagttgtggtctttgcattcgaaaagtttaggaactataagtgacagtctacactaatcatgctactctaaggcacatctatgcaaagaaagataccaagccgaggttgctaagatggattctgctgctccaagaattcgatatggagatagtggataaaaaggggatcaaaaatggtgtagctgatcacttatcacgaatgaaaattgaagatgcagtccctattgacgataccatccctgaggaacagcttatggtcatccaggaagtgaacaaaaaattcaaaagcagccagttttgggatgagatgcttgaagtagaggagaaacttccgtggtatgctgattatgtcaactatttatcatgtggtgaagagcctccaaatctttcaaggtacgaaagaaagaagttcttcaaagacataaatcgcttttactgggatgagcattacctctacactctctgcaaagataaaatctattggagatgtgtctcagaagatgaaatagaaggtatcttgcagcactgtcatggttccagctatggcggccatttcgcaacattcaagacagtatctaaaattttacaagcagaattttggtggccaaccatgttcaaagacggtcaagagttcatttcaaaatgcgattcgtgtcagagaaggggaaacataagcagaagaaatgagatccctcataacccgactttagaggttgagatttttgacgtatggggaattgatttcatgggttcgtttccgtccttgtatgggaataagtatatattggttgcagtagactatgtgtcaaaatgggtggaagcaatagccagccctacgaatgatgctagagtcgtcctgaagttattcaagagcatcatcttcccaagatttggagttcctagaatagtcattagtgatggaggcacgcactttgtcaacaaagttttcgagagtttactgaggaagaatggggttaaacacaaggtagcgactccttaccacccatagacaagtgcccaggtggaaatctctaacagggagataaaatcgattctagagaaagctgttgggaacaccaggagagattggtctgtaaagctcgatgatgcgttatgggtgtacagaacagctttcaagacccccattggcacaaccctgttcaatcttctttatgggaaatcctgtcacttacctgttgaactggagtacaaagctatgtgggcagtgaaacttttaaatttcgacatcaagactgctgaagagaaaagattgatacagcttaacgacctcgatgagctccgtgtagaagcatatgacagcttaaggaaagtaccaagtcgtttcataacaagaaaataacttcaaaatattttagagtagaagatcaagtgttgctattcaattctcgcttgaagctttttcctagaaaactcatgtctaggtggtctggccccttcaatgttagtgcagtaagaccatatggagctatcacgttgtctggaaaaggtgaagacttcacagttaacgaccaaagactaaagaaatatatgacagaccaaacaattccagaaggaacttctgttccactggaagagccacccaacccccaataagcgtgaggagtcaagctagagactctaaacaagctcacttgggaggaaattccatgactatctttgtatataatttaaactttcttattgttttctaactcactttggtggtgttttaatcttaggaaagtaagtgacaaaatcaattacaggatgaatagtgatctacagggtgaatagtgatctacaaggtgaatagtgaattacaaggtgaatagtggagtcactcaatcacgaagtcaagacgattttcaaacttttcgatcgagtgatttatttccagggaagtaacagttcgaaaattttgataacgggtcactgcacgttttcggtcaagtccaaggtgtgattgagtacgtggagtgggcgaaatcaggccatcacttcccaatgacaaaaccggtgaagcccaccttgtcccccatgacaaaaatgtcaacaattctatagttcttaccacccacctctcatcacgtttttgccaagggaagagctctcctcacctacgtacctcacctacgtaaggagcgcatctacctcctcctattcctataaataccaatctcctcatccaatgttaatcacacacaacaacatctctctctctctcatactcaatcgcaagcttctctgtctttaagcgatgccttcactcgatcgcaagcctctccacccttggaagtttacttcactcgatcgcaagctcccgacgcctcgccctctttcacttggtcacaaccctgtgacgctcaaccgcccccaacatctcacttagaagatcttaagccatcctcgtcaagttcactcgatcacaagctcaagacacccgattctcacctctttccactcgatcacaaacccgcaacgtctccacgtttgtttctctccctcttttactcgatcgtaaccactctgagctcaagtccacctctttcactcgatcacactaccgccgaagttcaggaagtcacttctctcactcctcttccttagatttgataaagtttagttgtgagttttgaatcaatttcaggaacaatgacctcatacaattatgattatccaatggatgctgatttcaacggtgatgaggcagagtcatggtcaacaagaccagagagagaagcgaaggaataccaacgtttccgagaagaaacggagcgagccgctgccaatgacaggagaagagaagagatagccagagggaagaggtcaatgacagagaattatgagccaatcgatgaagagatggaagatgacgcggagtaaattctggagcaaacccgtaagaccaccaagtctttgatgaaaaaagacaagctgaccccgggagactactacaaggttctcaaaagaaatccattttggagaacaagatatcctcacccggagacaatagcggagttaggcatcctggaggacgttcagctcttgttcgagaaatgccacatgacaacactcatgtctcatccctatcctacctatgaggatgacacacttcaattcctttcatcacttcaagtggaattgtttgaggggttgtcagctgctgagttaagagaagaagggcttggttacttaagcttcactatcgacgaccgcgactatatcatggcgatcaagactctggaaaccatgttcgggtttcccagttgcacgggaatgaaaccgaggtttgcccgagaagaattaaaatctttgtggaacacgatcgaagacaccaccagcttcaactccgctagatccaagagcaactccaatcgcaatcccgccattcgctattttcagagaaccatggccaatgtcccttacgctagggagatatccgccactgtgatgaatcaagacatggatacgttagacctagcgctgctgagtttcctctgttacaccaaagacaggaaaacgatgaaaggagatgccaatgacacacccccgtcaatgtatctcctcaatcacctatgcagctatagagggtgggcgctggccaatgacaagaagaacgcaaaaggagccctttgcattggagaagtggtcacaccaatcctcctatcgtgcgatgtcccgctgcgaccggatctaatcccaccacgttggatggatatcgtccatctcaagcttgcccatgtgatcgagcataaggtctatgacaggaggtacgctttcaagtttgatcacccatcaacaggagaagcaactattcttctcccattcagtgaaatgacaaccatcacggtgagagacaacatcgacttctcgtcatcacaagaaatcctccatgctgtgattggaggatccgcgtcccgcaatattgaaaaagtagaaggtcagagtgacaatgaggagaccaactatgagaactatgacactagctggtaccacattgaagaacacaagcccccttcacgagaaagcaagagtctcgctgaagcacaccggaagctcagtctaacccaaaggtggtgcaagtttcaagataagatcatccataagtgtgtcaaagccattgacaacatgcagaaggcactcaactgcaccacatccaccagtgcgatcaccagagacaactcgctagaagacatgccatccaggcgtcatgacattgctccgccaaggcaatctgcttatcaacagagagaactcgctgcccggcaagaacccgcacaacactcgtctcacgaggtcagggagcacaagaggaggaaaagcgctaggatggtcggatcatgaagcaagggtcggataatgtcgggccagagtgtcgtgctccacaacctactggggttgcgatcgagcataactacgaggagatggctgagccacatcaagaaccggtcatgcatgcggagtacactcaagcatatatggatgactacatctcagcacattctactgaggtaacacaccaaaaccctttgtaaataccgcttttgtttttgtttatatgtttatcttgaattctttcacaaattttgattacacaagggacagttaatttaagtttgggggagggttcaagacgtatttgacttgttttttttgtgaatatcttttgagtctaaatatcatctaagtcatagaaaaaataaaaacaaaaattgaaattttttgaaaataaattccaaaaaaaagagtgatcatttagttgcattacatttaggatcgagtctcgagtgtttcataaaggattgttgcatatgcataggggataatgaggaaatagccttgtaagcatgatgattcactaaaatgagttattagttctttgaggcatttgaatgcatgtcatgacaccttttcctgtcaatttgaacttgaatctgacttataattatcatgtttgcatcgtttttgaactcgtggatagaatacatatttggattttctttcacttattcaccactcttgttaatccaagtagctgcttctattattggagtagttcccccacccttaaccaatccttctttcaagccatgttattttgtgagagcatgtgaggcctattttcaggattgagcttggtagaacgtgttaggtttgagccgacaagagtagtatctcatgtagttccaatccgcgttttcggacttggtaggactaggtgggaacttatttggggattgagattgagtgtgaagagaaaaaggaagaaaaaaatgggttagagtctttaggagaaggaagctgaaaatcatattgaggtctcgtgaatgtttgggaagcacagaattcttaagatatgctctaaaaaaaaatatggcaacaaaacagaaaagaaaaaaaattataagagccataagagtttaagaaaaactcaattcactagactagactcatagagtttaagaaaagcttctccttaagaacaaaagtcaaagaaaagaaaggaaacattgatccaaaaaaaaatcgaaatatgcctttagtgcaaaagggtagacttaggatcatcattaagtttagagatatgaccatctacttgttattcacggtttatgtcattgggtagatggggtgctattcttgtatacataggttggcacttacctttggcaatcttctaaagcccagtcctttttaattgagagtcccctgctattaaaatctgaaccacttaaaagggaccatctttgtctcataacctgtcagtagttgcgcttattgcttgtttcactggctaatgtggaatatgaatccagacgtccaacgctcaaaaggcgtttaatggacgttggatctattaattccagagatatttgcctctaccccgaagggattggcttgtagagatggtattggctttaacaatttgattcgatattgcctacttagttagagatcgctaatgagaattagatcagtgtctagctttgcttgaggatttctatcaaaggagtgaattaatctgttgttgaacttgttgtctagggatagcttctgtgaagttttgtcaaccgcctgaatatatttaggaggcgacactattcgattaccccatccttaggaatcgtttatccatttgactgcctgttatcatttctgctttgttattcacctacctgttattgccatttctgcatttagtttcatttcatttctgttattgcataataggactgttaataccaaccaactctctgcttggcttgacttagagcctgttaatcatatctcatatgtttgcatcacaccggacttgattgacaacctaaaatactacaacgacatgatagtgttttaggattaattgagtaaaatcctactatcaacttctaacactgaaccgacgatgaaggaggctgttccggagcctcttcaataaatgtcccccgaattcgctgcttattttttattttcttttgaactcgttatgggctccggcccatttaatttgtggaaaatttgctactctccttgatctcgaaatattcattttggagatatgctttaaatgcagggcttactggaaggcgtgagtctttctgcgaatcactccagtcttaaatggaattgcgatctcctagggttacaaaatccctataaattgtggttccaagttttccttactttctatctaccccttcttttccttttttgcagcattggagtttaaccttcgatgctcggagttcatgccagacttttctagggtcggaatgatggatgaagatatcccaaatgtgccaggaagtgggccttcaccacctcgcagcttcttcaggtcccaaatccgaggtccatgtgcactgatcaagggacttttggacagagaccaagaaatcgcgatggcattcatcaaagctcttacggttcagcatcagaagcgttcgttggaaaagaggaagctccgaaaaaagattaaccgaatgttacgtatagtcaccgtaatatcaagggaacttcacaacctcaactctcatctcggggattggatcgaacttggaatctccgaattcgctcgcatcccggattgtatgatgccgatcatctatcttgctggccaaggagtccaagtgttttgtacgtcgagaagggtttcttaactcgaaatgtatacgtggtgaaactcatctttttgcttattgcttgaataaatgtcgttttatatcctgtatttgtatattcgcacagtcgaactttacttttctttgtttgttcgcataatcaaactcctttcccttttaatgaataaaacaaaattttattagtagctgaactcgtttccgagctgcctacgtaccaatttcggatcaagccacaccgtagttcatgtacataacaaaaacgcgagttaatttgaacataaaacttctttaagttcaccacattccaagaacgttggactggcctgtcttctcaatcctttaatctgtaaacaccattctgaaccacttcggtaacaatataaggtccttcccaattaatgccgagcttgcctggtccttcttccttcttattgtcaaaaacacgctttagcacgaaatctcctacaaagaaaggcctgcttttaactttggtattgtaatgccgagctgctgcttgctgatagttttgaatccggattaaggcttgatctcacctttcattgatagtatctaacgaatcatcgagcatcgctgagttttccttttcgtttaggggagcctctgttcggcgaagtccaggcacgttgagctcggccggaaccactgccttcatcctgtacaccaaagaaaatggagtttcctcggtagaacgcctaagagttgtgcagtaagccaataaaaccggttggagctcatcgtaccatcctcccttcaaatgacttaggcgcttttttaggttacgtaggattgtcttgtttacggcttcggcttggccatttccttgtgggtacggtggagtagagtaactaactttgattccccaatccaaacagaaagcttcgaatttgtgtgaaatgaattgtggtccgttgtctgtaattatctcgtatgggacactgtgtcgacatataatgtttttccaaatgaaggtttttaccgccgagtccttgatgctcatgtatgcttcagtctcaatccattttgaaaagtagtcagttaagaccaaaagatattgcacgcctcgggttgacctgtgcaatggtccaatgatatccatcgaccacctcatgaacaggtatggggcagagatggaggagaataactccgaaggctgatggataagaggtgcatgaagttggcaacctttacatcgttgggcgtacttaacacaatctgtgatcatagtgagccagtaataccccattcttttaatcttgaaagccatggcccttcctaacgaatgaatgccacacaaaccttcgtgtacttcgctcatgacgatctcgacttcgagcccaaaaatgcccaatagataaggatcgctgacacctcgtctatacaaagcatcctttgaaagacaaaattttgcgctaacgattctcattttcctagcttgccacttattttttgggagcttgcctgtcacaatgtactactttattggctccctccaatcagccctccaatctttagccagaatttggtcgatctcgtggaatattcatagttctggttcgggatgctcatttggctcaaggatatcttcctcgattagtggctcggttcttataattgtttctggaactgcatcttctgtcggattgatgggctcctcgctactattttcttttgacacgccgggcccgggtatggttgaaccatttgactttcttcatttgacaggtggcaactctatctcgggttcaccatgatcacgtatagctgctttgaaatgacgagggcttctttttttctctttaatgcttactctgaaatacattccaccgggatgactcttttaaccttaggatccgatgttgatgctaaagcagcaagtgcatccgtagtcatattttctccacgaggtatgcgaatgagttcgaactttttgaagcttttagtcagatctttaactacattgagatatgcttccattcttgaatctttggcttcataatctccattgaacattgaactggttaacaactagttgcgaatcacaataagcgagtactacttcggctccaattccttgtgctagcctaagtcctgcgattaaagcttcatattctgcctcgttgttagtagcgttaaataaaatcggaatgcttgttcaagaatttccaatgttggagattcgaaattattcccactccggacccttcttttgatgaagatccgtctacatgcaatttccaagtttgactctccggttgctctagtgcgccaagtactgataattcggtcaagaaatctgctaaaacttgggccttcatggcgactcggctcttttactctatattatactcacttaactccacttcccacttcgctaatattccggactgacttggactatgaagaattttttgaagtggctggttggttcaaacttcgatttgatgagactagaaatacgaacgcagcttctgggcagaggttacaaccgcaagtgtgagattttccatcattgtatatctggtttctggatctgtcatgtagtaaattggtttttgttctccacgatcctcccgtatcaagactccgcttactgcatggtttgatacagaaacgtataagtcgagcttttcatccacttcgggtttggacaatacgggtggtgtggttaagtacgccttaagctgtccaaatgcctcttcacacttctcatcccaaagaaatcctttgtttccctttagaaattgatagaagggtaaagatttatttgttgatcttgaaataaaacagtttaaagctacaatccgaccagttaaccgttgtacttcttcgaagtttcttggagacgacatgttgagaaaggcattgatttgattcagattggcttcaattcctcttttcgtcacaatataaccaaggaattccccggtgcatttcgccgggttcagcttcattttgtattgattgagaatctcaaaacattcttctaaatgcttaacgtggtcctttttcttcaacgacttgaccaacatatcatctatgtaaacttccatcgtcttcccaagatattcgtggcacattttgttgaccaatcgttgataagtagctcctgcattttaaaaccaaaatgcattaccttataacaataaatatctctatcgttgataaatgatgtcttctcttgatcttcgggattcatcattatttgattataaccagagaaggcgtccatgaaagttagtaactcgttcccagtggttgattccacaagacgatctatatgcgaaagtgggaaactatccttcgggcaagctttattgaggtccgtaaagtcgatgcataccctatcctttccattcttctttttgaccacgacgttgtttgccatccaatccgggtattgcacctcccttatagatcctatctttaaaagcttgtccacttcgtcatttaccgcctttgcttgttccactctgagttttcttatttttttgttttacaggtttaaagcttggatccacgtttagctcgtggtagattatgcttggatctatgccatacatatccgctgctgagcacgcaaacgatgctttatttttcttcaagagttctattaggacttcttttattttgccggttagagtggctccaattcgaactttccaatctggtttatcctcctctaacattacttcgatcaccacaatatccactttctgcccactcagaaatcttgggattattcctttcttcgcgggctttgttaattgctattggatcttcagacgatggctgactagataacatgtgcgcaaagcttcttgatctccctgaatggtttctactccacttggagttggaaatttgatgcattgatgatacgtagaggggaccgccttcatttgataaatccagggagtcccgaggatgatgttgtaagttgtcggtttatcaaaaacgacaaagtccacaattttcgacatctttccagctagaactcgtagcttgattgttccaagagacatggctgattcgctcgtgaaaaccaccaaaggagatggaggtcccactatgtttgcccgactaattctcattctttccaatgtacctagaaagattaaatcaaccgaactacccgtatcgacgagaattcttgacacttcaaagttagccacgtcgagcgtaatgactagagcatcatcatgagatctttcgaggtgccgcgtttcttcctcgtcaaatgatattgaagtgccttggtaattaacttcttctctcaagcttgatttcagtagaacattttgcctatgcttttaaatagcactaatagaatctcggcaaagtttggagcctccaaggatcacattgatcttccccttcgaactccttggttcttctttgttggtcaatcttggccttttcgagttttgaactggagagatctccactggcccatagctctgcgagatgccttttaaggacactacaatctttggttagatgtcatgttaccctatgcatgttgcagtatagactttcgtctcagacccaagtgtttgactttccttttccttggaactgcttcccgacattgttattgaaaggttgcgacccaaacttccttggcccttagttttccctgggctcgaatttcttagtagggaaagtgaccgccggttttgctggcttattcctttttgcaaagatttcttttttgtcttctacttccatccaattgtttgctcgaaaaagtgcatcttgaattgtgtccggtttgtgaaatattacactaaaagaaaacaggcaaacgacgactacgaaaggcgactaacaatgtagtcgtccttttgtgcaactactttacgactgatggacgacgttacggcaacatataaattggtcattccgtagtcgtattttagcgactacaaaaattagtcggtcaatggtcgtccaaatacgactatttgacgacgacattactgaaggaaataagtagtcgtaaagtagtcgtacgtacattgacgactacacttctgactttaatattaagtcgcaaaaaaggcgacaataatacgactaccttttgtttgtcgtcaaatagtcgcataattatcgtataatatggttggaaaatgtttttcgcgttgttgggtaggtatacctaattttgtagcgactacagtgtgtagtcgtaaaatagtcgtaaaaatcctctatataatgcacgacactcttcattctcattcaccaacaaatcaaaacaacatcaaaagaaaaaaaaaagatttcaaagaaaaaaatataagtttagtttatggtataatggcggtaaactacaattatggcggtggtggcggtttatatcgagattggatgtataagagatttgataaagtaacgggaattttgtctgccgaatatgtcagaggagtagaggagttcatgacattcgctagtagtcagcctatagtacagagtagtcgaggtaaatttcattgtccttgtagtgtatgcaagaatgaaaaacacaccatctcaagtaaaagagttagtagtcatttgtttagtcaaggattcatgctggattattatgcttggtataagcatggagaagaactgaatatggatagaggaactagttacaaggataggacatattttagtgagaatcatgaagaagtgggtaatgttgtagaagatccatatgtggatatggtgaacgatgcatttaattttaacgtggggtttgatgataactatcatcaggatagttatcatcaggatggtacttatcagaatgtggaagaactggtccgtaaccattcaaagaaattctacgacttgttagaaggtgcaaatactccattgtacgatggttgtcgtgatggccagtcgcatttatccttagcatctcgactcatgcagaacaaggcggagtataatatgagtgaaaagttggtggataccgtttgcgaaatgtttacagattttttaccagaaggaaaccaggctactagttcacattaccaaaccgaaaagttgatgcacaatttaggacttccatatcatacgattgatgtttgctcgaacaattgtatgcttttctggaaagaagccgaaaaagaagatcattgtcgattttgtggcgcacaaagatggaagcctaaagatgaccgtcgaagaaccaaagtaccatatagtcgtatgtggtatctacctattggagaccggttaaaaagaatgtatcagagccacaagacagctgcagcaatgcgatggcatgctgagcaccaatcaaaggagggagaaatgaatcatctttcagatgcgatagagtggagatatttccaagagttacatccccggtttgctgaagaaccttgtaacgtttatctcgggttgtgtactgatgggttcaatccgtttggcatgtctcgtaatcattcgttgtggcctgtgatcctgactccatataatttaccccctggtatgtgcatgaatacaaagtacttatttcttacaattttgaattttgggccaaatcatcctcgagctagtcttgatgtcttcctccaacctcttattgaggagctaaaagagttgtggtctactggagtcaatgcgtacgatgtatcattgagtcagaattttaatctaaaagcagtgcgactgtggacgataagcgacttttcggcgtagcatgttatcaggatggactactcatggtaaattgtcttttccaatttgtatggaaagtacaaagtctttttatctacccaatggacggaagacatgttggtttgattgtcatcgtagatttcttcctcatggtcatccatcccgtaggaacaagaaagactttctgagggggaagagacgcttctagcgagtatccacccgagtctttgacaggggagcaagtttattacgagcggttggctagtgtaaatccagcaaaaacaaaggacgttggtgggaacggccatgaaaagaagatgccacgctacggaaaggaacataattggcacaaggaaagcattttgtgggagttgtcttactgcaaggaccccaatcttcgccataatattgatgtgatgcatacatagaagaattttcttgacaacatcatgaacactctcatgagtgttaagggtaaatcaaaagataatatcatgtcaatattggatattgaaattttttgttctcggtcagagttacatattgatagtaagggtaaagctccatttccagcgtatacattaacacaagaagccaaacagagtttattgtcatgtgtcaaacatgaggttaaattcccagatggttattcttcagatttggctagttgtgtatacatggagaatcgaaagttttcaggcatgaagagtcatgattgtcatgtttttatggagcgactactgtcatttatctttgttgaactccttgatcggaatgtccaccttgcattatcaggtacaataaatgttgtctaagttgccacacttttttaacctctgatttaacttaaacatatatatatatatatatatatatatatatatatatatattttaggaattggagcatttttccgggacttatgttcgagaactttacagaaaaatgtggttcaaattctcaaacagaacatagttttaataatctgtaacttggaaaaaatctttccaccatcattttttgatgttatggaacacctacctatccatctcccatacgaagctgaattgggaggtcctgtccagtgtccaatatcggtggatgtacccatttgagaggtttttcaaaaagttgaaaggaaaagtaaagaacaaaagatatgcggcaggatcaattgttgagtcatatatcaatgacaagattgcttatttttcagagcactactttgtcgatcatatacaaacaaaatcaaggtaaatataattatttattttacgatgcgcaagctatacttcagaattaaaaccaattacatggatcaggttaacaagattcgatgaaggaaaagttcctgtatatcatgtccttggagtacctaacatatttatgcacgtcggtcgtccaagtggtgaaatgcacgtggaatggctttcagagaaagactaccaaagcgcacatgcatatgttttaagaaattgtgactattttcaaccacttgagaggtatttttaatcactccttaatttaaaatttccattatgataactttgatttatttatctttggttgtaaatatagtatgttcgaggattttctttctgtgaaatatccaaccttgtccgaaaaagaactctacgcgaaaagagctgaagaatattatctatgggttaaagaatatgtaagtctacatcattttagtaattttgaaaagtgatcatttaaattatgttgaaattgatattgtttatatattatgtcggtaacatattggaaccctacttctccatttcctacttgggttcaagagattgtgcatgggcctttgaacaaggttaaaacttggccaatgtatttcacacgaggatatttttttcatacgaaaaatcatggcgctggacgaaaaacatgtaactatggggtacgtgttaaaggagaaaattatgcggattcatctgatgaagcggatttctacggtaccttaactgatatcatagaactcgagtatgagggcatcgtcaatttgaaaatcacactttttaagtgtaagtggtatgaccctgtgattggtagaggcactcggcgaagccatggtgacgttgtagacgttctatcatctaggaaatacaataactacgagccatttattctaggtacgtaattaagaatacattaagttctctgttaattattaaataattttgtatatctattaatatgtataacttgcgtatgcaccatctcaaggagatcaagtttgttgtatttcgtatccatatacaaagaaaccaaaaaacatttggctaaatgttttaaaagttaatcctcggggaaacatttctggagaatatgaaaacaatgttccgactcttttgcaaacagaaaatgatgaagctgtgttgctgactacaattgaagatttggtaatagacaatccggtagaaagcttaaacccaatcatactcgattacaatgtcggagatgctgaacaagaagatgaattccgatgtaatttatcgtcttcagtcgaagatgatgaagagtactaaatgtgtgctttatatgtatatttatttgaaaaatgctgtttaagaatatatcatataatgtttaattatttgaataaatattacataaaccttataattttcatgaatatttataagtattattaatttgttgggctgtcaacatcccaagcccaagcctaaacccaataaacttaacgacgaaattacgattaacagacgacagacgtttaattatattgggctttcaaatttcgagcccaaacccaaaagaattaacgactaacgtgcgacaaacgttttattagttgggctattaaattccaaagcccaaacctaataatgttaacgacgatagtacgactaacatgcgacacactattaatttgttgggcttttaaattctgaagcccaaacccaataaaaatgaacgagtatccaacgactatttggcgacaattgtctttatagttgggcttttaaatttcgtggcccaaacccaattatttagtgacgaaaatacgactaaattgcgactacctgtataaagaaaaccctaattcgatcgattcacttctcatttcgtccaaacaacactcttcttcgatcttcttcttcaacttcttcttcgatccattttgaattgacttctccttcttctatctgttattcgatctgttcttcgtctcatctctacataaacccaatcgagttcttcttcttcttcttagatctcattcgattcgaatcatcttcgatctcttcgctttcttctactctttgatctcttcgctttcttcagttcttcgatctcttcgtctctcttcatcgatgcctaacgccggtcgtggaggttcacgaaagcgggagataacccccaatgttactcagagagccggagggtcaacaccgcttggaaaacccgcttcgctgcctcagcagtacgacttcactccggtgtcggtgcctcaatttcctcagacgcagccgccagagcctcaacgtcagccccccactaccgcaactatctgccgctgcatcaactattccagagctccaccactccgtgtgtagatccgccgccgccgcgatctgaagaggtgcagtttaatccactgccagaagctcctctaaaccaagatcaaccggagtctccaattcccaactctcaggcacacaaccatccatcttctcaaggcaacaactttcaagagggagctcctcaattgttgtcggagctacaagaagactcggggagggctctcaatgacatacttatggttctcggaagggaaatgtggaccactatattgtctcctattcccaagccgaagactgaatggtatgtgctcttcctcaaccctattagattttttagattgtctattagcttgtgttaggttgcagcaatgattagcttgtgttaggttgtgtcttgattagcttgtgttaggttgtgtcttgattagcttgtgttagattgtggtggattgctcttgtgtccgcttcgttaatttgttgtgaacatagattgtgtcttgattttcttgtattagattgtttcattggattggcttcttgctctcttgtgttcgcttgctatcttgtgtgacctattttgtgtgaacatagatcttgtcttgattagcttgtgtaagattatggttgcttgctatcttgtgtgaacatagtggtcatgtctagaaccgcttgtgttctgttgtggtggcttgctatcttgtgttctattgtggtggcttgctctcttgtgttcgcttgctatcttgtgttctgttgtggtggcttgctctcttgtgaacgcttgctatcttctgtgaagtggtcatgtctagcaatacttgtgttctgttgtggtggcttgctgatgagtgttttatttcatttcagacttttacctaaaagaccacacgactactacaagtgcacagtatatcggagtagtattttaggatcgaatccacaaggagagaaggagttcagagaaatccttaagaagagagtgaagctaggaccaaaataaagagagggggttgatgtatgctatgagtaactaaactaaaagactactaactaaactaaacgataaactataagagagaagcgttacgtcatcgggggtttctccggatgttcatggttcaataataaggtatagatctcaatctaggtgataacatggctaggtttgtttacttccaaattcccgaacatacgaaactctatcaagactagttaaccctaacggctaataggtgaaaactggctattatcactagtatattgtgtacgcagttgccctatcggatataggtgctaacatggtttcaaaatacaagatcaaagcattaagttcaaattcgattctagttcataagtccctatcactcggcgggcgtgcaacagttatagttctttattcagttgagttaggtcaagcatttaaacgagattttgccaaagaatgaaatacctaagggcaagtactaggtggcgttccggacatacaagcattaagaataaactcaactagaaggaatagtgtaaacgatcaaacaaagccatagaaaccaccaacctagatgtttgatctattggtccccatgaattctcctttgaaaaccccctcaaacccaactagagaactactcgctatggcaaaggggctaatcaaagttgggttgagtaaaccataactaaaagatgaataaaacttaaaaggggtttagagattacttctttgaatggagaatacaagaggcaaagctccaccttgagtcttacacgaaaccgagaaagagaaagagagagatggtgttcttcaagcttcaagaggtacggcggcaaggaggcagctcttggtgacggctagggtttgctggtgatgaaggcacacctagggttagggctaaggacaagtatttatacttgaggcccaagaattaggtttaggggtaagaacgtcattccgctggataagtaagtgatcgggccgagaagtgggcttcaaggcaagagcctaaaggtggcgacgcaaagagggaaagacttgggtgtgacctaatggtcggtggtgagctactaggagctgcccggggtcaagtctcatcggccagatgtgttttagacttattatttccaaatggctggttcttgacatgtcttcactctttgcgccatatcttctaaacggctttatggattgcttctagctttccatccataccgaaatatcatcatttcgaatctgggaagaccttggccggatgctaaacttccgaagcactggaatgatcgtcttttgatacttttagcttcaaaactcttaaaaccttcttggcacctagaatacgtgtttctcctcttactggctctagaatggcaccaaatgatctctgaagcataagaaaacaatagctaaaatgggctaaaaagccgtgttatcaactcccctagacttagactttgcttgtcctcaagcaaacaaaagaacaaatctggtggagaggtttgaaaatcgcgggaactctcctgttatcagtgaccatgtcttgaatatatcctacagaccacattaaacaaaagttgcgttagaacggacgctcaatagtcttatgcctttctcgtccttgtccatatgccttgatcctgcagaactctgaattcatgtcaatcaactctttacattctttaaatgttttggcgtggactttctcattagaaggtgtcattcggggtagacggcgcttggtatgaaaggggattttggttttaagtggtggagttaaagtgtttagggttaccgtatagtctcgaatgcaggatatgttgcaaaacagcaagagagaacggatcggttgaggtccacagtttccaagcacttcgtcttttaaacaccttcttctgctttacttctttcttactttcggttcccccagacttaggtttttccaagggggctctcttttgtaattggctcatctctcctttatgtttcaatgtctttccttggagctatgccactagactctcttggttgtactatttcctttccttcctttttttattattatttttatttatttttcttttcttttcttttcctttttttttctcttttttgtttttttatggaaggggaaacagaacttctaaacactaagtctattgagcataccttttgaattggttccaaggaaaaataaactcttgggccgtttgttgcaatcccttcttttacttccttcttccgtctttgtggcgagaaactatgttgttcttttctctccgacgtttatgcacatatctactaaatgaaaaaggaaaacagaatgcatgaggcttgaaaagaggatagggtttaagggtaggaaccactaaaagtgagtggccattcaggatcagcagagagtggtaaaaagggaaaagaagtcctaaatgtatatgctcgtttcctcgatctaacacctcttcatgagaaagaattaagttcaggttaatcgtccaatatagggtagagttgacgtcggaaccaacagaaatttccgcggggttaagcttccgggggacggtccgggcgtagtgttcaaggttgcctgttccttgcgaccatgtaagtgttcctcaagaaacaattctcaacacataatggtcaataatcatcatataacaaggtcttggttctctactggttttgactcaaaaaaacattactcgataaataagaaaaactttttgctttattacaaaatatcggtgtaaaaaatggaaaaatgtttcaagtcaacaaaatagataatagcattagtagtaacagattcattaacccccagacttacttcacaccgtcacttaagtgacccgcgtaaggacatcggccacgagcaagagtacgaatttttgaaagttgcccgaatgcatggccaattgaccttaggtgctcaaaacacaatagactatcaaagggcaagtttgggcaagaatgggctcgaatgggcaagttaaggcaagaacaagcgtgccgcgggcaaagtttgccccgccgggcgttgaccgacagttgaccgcaccaaggacgcgtggcttggctaacttggggcccaagaaaagttgcttggagccgaattttagttgcttggagtcgaagtttgggcggccacgtgttactcatccgctagagcggcgagcatgtcatcgcgggtggatgacatgtggattggtgactcgcccatactcatgacacgtggacatattgactcgccattcccttgcctatataatcccaactcgaccccaattgttttgtgaagagaaattgagcggaagtgagaggctgccgagtttaaaccgtccgtttgattcaagttaaagtcctgtagccgaaaactcagcccgaatcgttggaagcttttcgttggttactgagtgagttctggataatggtttaagtttcataatcatattctcatgcattcttgattgatttcgtgagttatacgtggtgcttgtggtaggaggcaaagaccataagcgtgccaagatcttgatatgtctggccttcgtagtgaaccgtgctatcgtggggtcttgtaacattgttacttgatcgccatgaggtgcgaagaactcggagagacgaggctagctaccgttggtgagtgtgtacacgacggtgtagcgtttggtattaatgctctcgttgcatacatttgtggttgtaacgcgggagatcacgggagtgtgcgtgtttgttgttgggtttgaaagcagcatatcagaccaaacttactaaaactggagtcttaatgcattgcatatttatgtagttgcttcggcaagctactgttcgttgccattatctgttgcgtgtttcatgttgggtatttgggttggggtaaactaatgtctgctgcagggaatcccgagctcactgagtaatcttagattactcatgattctactagttttgtagaaaacccgtagtgggaagtagagggcgtggtggacaataggaaacccggagtagttttgtgccttttgtaaaacaagtatgtttctattatgtaccgtgcttttggcactaggctgtaacgcccccgaattgccctatagccggactagccatgggcgacctggcactgataccaacttgtgagacccagtcccggacgtctcggcgtccggcgaccgtgtactcaagttcgcgcctcttcccgaccgaacctcttaattttttgcgattaaccatagaatggcctttacgaggctaaattctataatcgctttcttattacacagcggaagtctttctaaccttggtttaattctaaccaactcttgtaccggtttcatcgtctttgtcccttagacttagatcgatcctttactcggtcaagacatgcatattgttcgctaaccattctaggcctaacaatcgcatattcctttgtcctattttcacggtcaattcccaaacgtctatcctaactagtaagctagatcgttacataccttggccactatgcagatttgattccttagcccgtttgtcgctttactccattcgttcaacgactcgtatccgatcgtgaattgatgaaccaatctctatcgttacttagccatacaaccaaccaaccccactggtctaagtactacgatagagattggggatcatacgattcccttggttcacgatggccgaatcaagctcttggctcattcgtccatccgtcctccaaacgtacgccccttcggttccatggtggatgattcagcactcagcttatcgaaccatccatgtttcgatctggtcgtttactacgaccgcccatggtttactaactgtttatccgtctggtctatggtggtcgataaagctttcgtcttatcgatccatccttacgatccgaacgatattcttaacacacccaagggtccgtggattcatctatcagatcatcgtaggctagactatgaaatccttcttccgtcggccttaggtttgctcgcgggtccaacgtccgttttgtccatcggttcccaccgtggactttcctgttggttatcagtcgagtcaccctttggtcttaccgatctctgatccgtttcaccatggctgaggagatagatacatgaaggcggccgcgatattgatcctatatggtgaatcacgttccttacccattcttggtgctttctccctttatcggtgagattgcatccatgggcgacccttgagtgtgttcggatgcacttatccttgtgcttcctcgaacacttttcttgatccatcccatccgatgatcggtctgtccgacccgatccgtccgacgatcggtctaccagattcgattcgtctctaagacgaacggtctaccctctccatcctctacactccatcgaaccgttggaccgggaggtagcatgcgcatcagttcggtcgagttatactcgccgagccgcaccccctttccgaccaacaacttcgggatgtgttgggacacttttaagaatgttttgtggtgtatggatgatgtgtgagatgccttgggcgtcctcccttatatagggggcgaatagatgcttcccgaagcatcacatccgttccttgcacccttccgaaaggtcacatccgttccttgcacccttccgaaaggtcacatccgttccttgaacccttccgaaaggtcacatccgttccttgcatcctttgggcgttgcaaatgttcattggtacccgctcgactttacaccttttggccgagacacctcttcacccgtgagctaccacagtccatcagctcgagtgtcagctgaccggaccacccagctgggtcagtactcgatcagctcaccgagctcagtcgagctgtcggtcagctcacctagctgagctagctagtcttccagctggtttagctcacctagcttagctagctagttcatccagcttgtccagctcacctagctggttcaacttgaactttctcgttcttcctactaagtattttggtccgttcctcgaccatgatctagttttctcctaaaataaaccggcctctttatgaaagcgggacgcggtcgttacagacctagttacgctacagtgaaaatgatcgatcacaacttagtagagtttccagttgaatctggttctttaacgaaattataatcgaccctcctcccactaggaacaccactttggcttgctaatcttcatgatattctagtgttgagcgacccggagtaggtcttatatcatttaagaaaacactttatgcatagtatatagcttatacttggcaaagagttacccaaaaatatatcattttatcggatccttgttaaaatttacataataataagtaattttgcaaaagcaacgtaaagcatcctatttccggcatttcctagtgttcgtctccccgctatggtcatcctactatggttacctgtaagacaagtagactcatgagtaatctaagattactcagtgagctgggtctatgcacaaataaatctctagggtttaatcaacttaataggtaaagttatccatcagagatcacagagtacgtaataaacgtattatcatatacttataataataccagaatatgcagccaaactagacacatgaatgaaccttgggcccagcatactaccaaccttaccaaaaaggtgcaccacaacatcaacacaaactcctgcatacgtgtatatgtgttctccacgcgtatgctaccacacacacgtacgtgcacacccacaccacacgtacgtacacaattgtgaacacccgagctatagccacaaaggcttataaccagatcatcactttaatgcatcgtcatgcattactcggcatacgctccgagtcttgtgccatcatgtaagtgaccactcaggatcaagacttactatcacaatcacaacacaaaaagggagacagaagcttactctaaacatgatggtatcgggtaaaccttgaataccacttagacacaataacctcatgcagtactatatataagtagtttaccatgccccaaactagtatagacaatcaagcatcaaatcatgtatcaatatatattcataatatagcaaggatttattcacaacctcatagcatatctcatttaagtataacaatctaacaaggtaagtaagccctcgaatcatatctcaattcatcaagtaaacttatttaagtccatattcatttaatctagtcatgtagcctttcagtcgagtttttaatcagacagcctttcagtctctctctcttgctttcaaaaatgaaactaggcggagagagctctatttctaatccgcccaaggtcggccatgcagcaccgcccgctgccacatgtccggacagctgccgcgcccataggcgacaagtgtctcagacgacagcgtggtgataggtggcgacgggtgtcactccaccgccccatcaacttcggctccaagaattagctgactttggctccaaggttggtaacttgaggtgtcctactcatgtcagtttcgcgaccggcgggacaaacttcgatgcagcacgccgaactttttccatctttgcccattcatagccattcttgccctttgatgttttggcaccgtttggacacacgcggtcaattggctttgcattcgggcaaaagtttctcattcggtcctttggccgtgcccgatgcccttatgcgggtcactacattctcccctccttaatagaatttgccctcaaattctaaccttcggtcatttccaacttccatgaattctcccaacatttttacaagggctttgaatttccttgttctaattatacaattgcctgctcctcgaaccgaacttcctttcttttgcttatttccctgaagtatgcccgatctagacttatcttgagcccaactaagttcaatttcttttctctgattcttcatttggccgaacgttggtgaggcacttccgatggggtttcgaactcatctgatgcttatagaagttatttctcactcatataatggtcggccacacaaaagcaagaaaatacttaacttattatacattcaaaaggttcatacaagttataagtatcgaattttagtcttagtctttatatattattcaacaagttctaagccttagcatatttacaaacaaaatttcgctatgactcagccgattctatacttacgcgaaaagttaactatattcttcctagatgatcttacggaccatctgtcaagggttcctacacttaggacactcacaccttacccataaaaatgagggcatcccttcattcaaacacttctcctcctccgccgtagtcattaatggcccgattcctctcgaagatccttcgcccgcatttggcacaacatcaggcagtacatggacacatgccccagtcctccgcaacaatagcacttggtatagttatccatataggacatagtcggtggtggatacaagcactcttcggtcagatgatcggtatgaccacatattttgcacggacgcttagctggtgtggccaacttctccccaattgacttcctcgctgctgctcgtattatgtgtttaaccttggagttaatcccatatacgatcccaagtggatgcaggtttatttgaacgatccgctggtcctaagccttctctgatcccatttccaattctgccgctctctttcccttctgcctctcatcttctccctccttatcaaccatctttcctttggacctttcttcatcaagtcttaaacgattcatcaaagacttctgattcagttccttttcaagtagcatcggatcccacctcccatttccttcatcatcactcggttcattccctttaaacatttcatcctcccagcatgaatccgcctcgctagggttcaatattatcaagatagctttcaaactgtccaaggagatgttgatcacactcggactcttaggttctggcgttaaggattcaaatgagtccgactaggaatcacccccatcgttcccattttctcctccttcttccccattcggaccatagtcttgagcacactcgacaattaactgatcaattgcgttgtaatgaccctcaccttgagtatgactttgcccgtgatgcgcccgcagtttgccccagtatgccccagttcgcccgtagtgtgcccgcagtgtgcccgtagtatgcccgtggtacgcctgcagtgtgcccgcagtaggcagtgtgagcgacccgcgctggcctaagtttggccgagatgggcgtgtgctggaccatggaccatgtcatcgacctgcttaaggctgcgagcaggtgggtaagctgcttggtgttttgtggctgagaatcgaccatgtcgatctgccaaaattctgtggctgcggagcggccaccgagcaggatccggttggacgacaggtgggtgatgactcagggccggttgtcgccccttgagtagcccatggacggctgtcgactagcgggatgtgctgagtgtcttgggtggtgactcagcgccatgtgtcgccgggcaggatgcgattagtggcgagactccggtgactcacggctgggtgtcgctcccacagcgtgtccagtccgtgggtcgcctatcgagcgtggcttggtggtgacggccgtaacaagtctccccaagcaccttagctaaccaacttccccgaaaacctataaatagccctcattcctgatccttagaacttacacctcgaataaaaacccactataagtaccttcggccactagtaaaccagaggagaacccgcgaaaagacccaatttggaagtcggtaagttttccgaccttagttgcttttagtaaccgcagattagtacttaatagagttaggttgtggattgctagataaccgagtaagagaaggaaccaatggattcgagggggtaggtatggccgtttcccgaggatgcgtggatcaccagtaagtctcggacatgtgaagtagcacatgtttaggtgtttaattttatttacttataattgcctaggaggttagtaaatcatactaagtgataattattgtgtgatgcattgtcttttgttgtgattgcataatgttaaagtgtagtataaacgttgtgctacccaagttctgacaacattgtcgattgagtcttgcttgttgattgtaaattgcttggtatagttaggtgttccgatagcggtataggtgaaaccctagagatcccggtctaattgagtaatactaggttactcatgatgctacctttttgtttacacgaaaccttagcggggaatctataaacggcgcgatgatcattaggccaaccagcttagattttacagctcttgcaaatactgataatgtttattatatatgatttcctatgaaaattaataaggatccgccctatatacgagttttggtaacgttttattcgtatatatataatgtaatgatttaaccctttttataatggaattgatggttgaatcgataatattattagtctagtccaagactaacacaactcgtgttctcggaacgggttgaaaagccttaggccacgaacacgacgaaaagtttctcacggttggtcgactatgtgaacggtcgtgttccggacacctggttgactaactacaagggtctaacgtgatgcttccgaatttgtccttagttttaggacggttcgggggtgttacacgcgtgtgatatggttcaaattacctagaactactctctcaaataagagatcaattgcagtattttaggatcgaattctcaaagttcttttgttcaaacaatgagttaaatgtcaagattaagctagcagggtatgagtgaaatagtaagtaaacaaagtaaaaagacagcagattgattgggttgtaaacgattaggaaaagagctaggaacatggtatcctcaggaaactattagttagtagatttaataaaagctaggttgttatcgaaccattcttaaactcaaactctaattatggaataaccggggggcgtgccgcgaaactccctatatctatagccaataataaccggagaagccgagaaactatcaacctaaatatgcattcttaacgagttcaatttttcatcttagtaaataggccgattcttattacacacctataaaccagactcatcaaataatagatccaactatagatacctatggcgggcatatctattgtctagattcaagatctagttaattactctagatctagcattaagcataattaaagatgaagaattctacagataacctagcaaagggggcaatctactaaaccatatgaatccctaatgagaaaccatattcctaacaagcagactattcagacatattgaatgaaacaaacaacataattgagatagaaagcataaacacagtaaacagagaaggggaaagaaaggatctcttcactgtattaaaaactagaatgaatctctcaagaacaatggatgaatagcttatgtctctcacaatagggttttgcaaagaacttgataaaagactttatttacgaaacttaggtctaaaacaatatatatagaccctaaaaacgtccagggactactaatgcaaatagggaagtcttttggggcaaatttgatcttttataaactcaaaagcgtctagggtttttgctgggccaaaattggtgtcgatcgacaccaagaatgtgtcgatcgacactcctcgctgatttctgaaccaaaatcgtccttagcttccttttccttagcttttgctccaaaatgtctccttatctccattgttgtcccattgaattgaatacctgaaaagacactaaaaatactcgagaaataacttaaagactcaaaatcctatacgtaaaacatagataaaattggtgaaaatcgggttatatcaactcccccagacttagcttttgcttgccctcaagcaaaacacaaaagccgaacccgtggaagaggttttgaaaacaaaggaactcccaacattctctagcctattaccatgatcattcaaactaagtccatatgcctaacaagtctaatcaaatcctaaccaacatgtacttctctgcaagcttacacaacattctagattccatacctaagttccacaactatatccaccaggctttcatcgctgggtctcatcaaacaagccaccattcaagatccttctagactcattcatgtactataccatgataaattaaccattctttatatatttttttctttttcagtgttctttctctccccctgacttattcttttttgagagtaaacaaaggggaactcgcatactagatcgacaccctcggcattttccaacctttgtaattgattattccaaaaaatgtataataatggggtcataggaaacattcctacccctatacactatccgaaagtcgtctcaatctctcattatatatatttttttcattttataaggggagaggaacatattctttttatcacattggtctcaatatcaggtatgaacgaggaatcaagatctatgaatactaaccgtttgaagaggtaaaaggaagagtagtgagattagctccagccttagtggttgagttggaaactaggatatcctctagtctgttggtttgccatctagattttccaatagtcggattggctcgaacctgcagcactcataaatcaggcaataaacaagagaaatatagatcatgattcctaactaaactaaagaaaacgtttttttttttttttgggaagggaaataaaagaagtaaccaaatgaactgcaaaacgaaaaataataagaaacaaaaataaaagcatcaatagtaagaacctcccccagacttagacgacacagtccccagtggcattcaaatccagagaaagcgggaaaaataaatcaaaaataaaagaaaataaaagaaagggaaaagaaaaatcaaaccagtgggttgcctcccactaagcgcttgttttgagtcaatagcttgacttggcggagttcaggatgtgggtggagtggtggaggattgcatctgccgcctcgccttccaaggtggtgtgtaaacggatctggttgtagcagcttctggtgtcgatcgacactcagtggtgtgttaatcgacactcttctcgtcacctgcaagaacaataagagaaacaagctttcgaggaactctaggcttgttatctagtgaagcagtcttcgaataatctaaagaattaatcaaagataaaacaggagaagagaaagatgagaacttatcacataggtcctcaattggtgtgggctgaagagaatgtgcagaatcctctgtctgtgaaacccgagggtgtcgatcgacaggggtagtggtgtcgatcgacaccgttcctctacaactctcattggcgagctgaacgggtttggagcgttgtgtgtggctctgtggtgggattctgatcaatctagggaggtgtgtctgtgctggaggcaatgcaactgataggcttagtaagctctgaaccatccatgccaaactccatctctgaattacaaaccttgagagagattctccctctcttcacatcaaacctagtaccagctgtaactaaggatgctcttccaaggataaggggatccttgggttccttctcatagtccaggaccacgaaatcagcagggattatggagttaccaaccttaacatgaacatcttcaaggattccttcagggcttcgcttggaacgatccgcgaagagatgagtgatgctagtaggcctgtagtgagtcatgcctagtctctcagcaacagacttgggcatgaggttgatgcttgatcctagatcacacaaagagcagctgaatctgcttgtggagatagagcaatcaagaacaaagctacctggatctggaatcttctcaattgtctaaccaggagtaatggtgcggatgtactcagctatgtctactctctatgccttctccttcttggccttaggcagcatgattgcactgatatctctggtaagcagcttagcttcatctgaactaattccaatgtcaacaagtcgcttgacatacctgttgagtgaggcggaagatgtctctgaaacatccttaggaagagtatggaggatcttctccattatggctgtgcacttggcagcatgaagcttctgcttagaacaacgcctcctcggataagggataggaggagtgtagacaaactcgggatgcataggtatttgcacctcacagggtggagtccggatccagtgtcgatcgacagtagaggggtatcgatcgacaccgtcgtattgagtcgtctctgagaaaagggtcccgtatggtgtcgatcgacaccatctctgcaactgcgagctccaactcgtcttcaatgtccaattcctcacacacatcttctccttctctgatcaagatggcattgcagctcttctttgggttagcatcagggtaaccaggaagaaaaccctcttgtctcttgatagattgtgcagtttgagctacatgtacatctagcttcttcaagtgagaacttagattgtcgatcttcccattaagatctatgtagacatcatcaaacttgccattaaattccacaacaagctttgtttggctctccagaatctgctcaagcatcgattccactcttgtctctgatgagggtggggggggggggcttggtaagttgaattaccatagttcctgaaaggccccgatccagactgcctaaagtccggacgagttctctcgacccaagccactaagtgactcggccctaaccgtttatgaggttctttcctagtctaatccgttccatatgattccgtgattcaatatatgagacgaatagagtaaacaaccaatcggatactttattgattaagcaaaggattcgatacaacctatgagtttgcatataagctattacaagtcatataatcgatccctagactatccgaactatcaccacccatcagcccggccttgagtctctcgcgcttaagccaagtccttcccacgatcaccatttgttcctgaaagtcatagagccataagtaatctcatttacttaatcatatgcaagtccatgcaatgctctatatgccatacactactcggatacgtggagagaattcagagaggggaagatcgcgcatcagtccggccgattctcggcaggtcagttaagacccgccggtcctccgccgagccgcgtccctgcctcagccgatccctacctggaccgagtcttgtgtaggatgcacatgacccggatactacccagccctctagtcgatcctttcaaggatccgactactaactcacatcctagaacccttagactcaaagtctaggatcccttaccttccttctcgaggttaggtcgatccgaccctccttctttattgccggccacagcccggctaccgaatcctaagactatttattctcccaagagggagagagttttaatggtgagtttcttgtgttttcggtgtgttgtggtgagtggatgcttcccgaatcaacacatccgttccttgcacctttccaaagagttgcacctttccgaagagttgcgcctttccgaagagttgtatctcttcgcccataaccacccagctagtccgttactcgtccagttacctcgagctcgtccgtcactcgtccagctacctcgagctcgtccgtcactcgtccagctacctcgagctcaaccgtcactcgtccaactgcccgagctggactgtcactcgacctgagtaaccgtcactccttccagctgagcttgagctttgggcgagctgacccaactgatttctttacgatcctagcttagcctgcatgatttctcctttgtccgagcttatggccagctccttctcacttgtctgagactacaccttcttctctcggaccaagtcctagccaacgatcctattgaggatcgcgggcgttacaagtctccccccccttgaattggatttgtcctcgaatccgcatcaagttgatctttacccatctccttgaatcactccggaaaattggccttcatcttattctcggttttccaagtgtattcttcacggcctccacaattccacaagacttttaacaaatcccttgattttccccgagtccctttcgtcatccggtccatgatccgtaccggccatgcttccaccgtcatgttctcctttaacccgggaggtatatcttccacgctttcttcttgatcacttaaacacttccgtaattgtgacacatggaagacgttgtgaaacgcatttagttttggaggaaggtcaagtttgtatgccaccgcccctactcgttcgatcgccttgtacgggccaacataccttgggcttaactttttccttgaggtgaatcgccctgcccctttgtaggtcatcgcctttaagtacaccaaatctcctacttggaattccaattcctttcgatgtttgttggcgtagcttttctgtcgatcttgggcttcctttaacttgatttttaagaacttcattctctccgtggtttcatccacgatcgtaggtccaaacaaccgacgttcgcccacaggcgtctaacacaacggtgttctacaagctcgaccatacaacgccacatagggagacataccaatactagcttgaaaactattattgtatgcaaactctactaaccttagaaatttctcccagtttcctccccaatccaagacgcatgccctcaacatgtcctcaagggtttgaatcgttcgtttggactgtccgtctgtctgtgggtggtaggcagtacttaggttcgctcgagttcctaaggccttttggaaagccttccaaaactttgacgtgaaccttgagtctcggtctgacactatactaaccggaatcccatgtaaccgcacgatctcgtctatatacttctcggcaatgatttccgctccatccttatccaagatcgccatgaagtgcgcagacttagtcaatcggtctaccacaacccataccgcattgtgtttggatttgatccccgttggcagtccagtgacgaagtccatcgttatgtggtcccacttccattccggtataggtaggttttgtaacaacccacttggtacttgatgctccgccttgaccatttgacaagtcgggcacttggccacccatctggccacgtctttcttcattcctacccaatggtagtaccttttaaggtcgcggtacatcttgttcgacccaggatggattgagaacttcgattgatgcgcctctcttaggatctcctcctttaatgccctatcgttcggcacacatactcgatcgttcaccacgattgtaccattgttcgaggtttggtactcggtcttgttgtttagtgcccatccttttatctcctcgtcccgttcctgagccagccggatcctactaagcaagtcggcctgaccgtcccgttccgcctcaacttccgagcgcctcctactcagggcgtcggtgacttggttggcattgcacggatggtacgctatatccaagtcgtaatccgccacaagttccatccaccttctttgccttagattcaactccggctgagtgaatatgtactttaggattttgtggtcagtatagatttgaactttagcaccatacaagtatgatcgccaaatcttcaaggcaaatactaccgcggccatttccaaatcatgcgtagggtaattcttctcatgttttcgcaattgccttgatgcgtatgcgataacactccccttttgcatcagtacgcatcctagtcccactatggatgcgtccgtataaaccgtatagggctcaccttcctccggtaagaccaataccggtgcattagtcaacatggcctttaactccaggaagcttttctcgcactcatccgaccagttgaatgcggggtcttttccggtcagtcgagtcaagggttgggccatgctcgcaaaactcattacgaaccttcggtaataccccgctagtccgagaaaactcctaatctcggtggcattccgtggtcgtggccactcctttattgaccgtattttctccggatcaaccgatactccttggtccgagataacatgaccaagaaaaccaacgctcctttgccaaaatgagcatttacttaacttcccaaatagctcatgttcccttagccgttccagcaccgcccttagatgttcttggtgagcttcccaagatttcgagtaaacaaggatatcgtcaatgaagatgataacaaactcgtctaagaaatcccggaataccccattcatcattttcatgaaggctgctggtgcattggtcaatccgaatggcatgaccacaaactcaaagtggtcgtaccttgtccggaaagccgttttcctcacgtccgttggcgctatgggaatttggtgatatcttgaggccaagtcgatttttgaaaaccactgtgcacctccaagttgatccatcaactcatctatccggggtaaaggatatttgtttttcacagtaactttattcaatccccaatagtcgatgcatagcctaaagctaccatctttctttttcacaaacagaaccggcgcaccccatggtgagctactcggcctgatgaatcctttatccaacaactcctccaactgtttctttagctccgccatttccgctggtgccatccggtacggagctttagatatgggggttgtcccgggctcgagttctatcgtgaacgggtctgaccggtccggtggtacaccactaacagccgcaaacacgtccgagaactcgttgacgatcggaatgtctttcaactccgcactcgcccccacttccttggttgtgatcgtggctaaatatgcctcacaacctttcccgagcatcctttcagcctggattgtcgagattaccaagcttcccgaggttgttcttattccttggaattttaacataccctcgtccctctcgaattgtatccgtcctcggtgacaatctatgtgagccttgtacttccccaaccagtccatccctaagataacatcatgtttctttagtgggacaatgattaggtccgcgggcatattgacaccgttcactacaaccgagatgccccgaacaagtccggtcggatacattgcctgtccgccggccgctcgtaccattccataatcggtgtttggttctttcctgaacccacctgtttcaaccaattctggactaacaaaacaatgtgtagccccagaatcaaatagagtgtgcgttactacgtcaccacctctcaaggtccctacacattcccttagaatgctgagtacctcccctttcccatatgtatgatgcaatgcaaatgcagttattgaaataatgaatagggagttgtgagaacgtaccagtgatcgccctgaagtttccggcatcgttagcttcctccgacaactcataaactcgcggtgccacggcttgccgctttgggggaggcggcagtccatttcccccgcgattgtccctttgtccggcctgcttctccgcagtcaacttagggcactctcgctttagatgtccagtctttccgcaatagaaacaagtccttgtctcttcaccgagaaccttggactgtcctggttccattctcgggcaactttggatcgcatggtccttgcttccacaccggccacatgcacctatggccttccagcaagttccgctgtggctcttaccacaggtcacgcattccccggtcttagcatcggacttggtgttatccaccttgttaaatttccttttcttatccgcgggtttggtggattgattgttccggatcggtgctttctcccggttcaagtacctctcctcctcgatcccttcctcaatcattgctgccctttcaaccaattcggaaaccgagttgaatgtccggaccaaacaatggttgcggatctctatccttagtccacggataaatcgacgcacttgagcttgtttctcctcaagttcacgtcccacataacgccttaggcggttaaattcctcatcatattcacgcaccgtgcggttcccttgaactaggtcgaggtacgcacattcaagcctatcccaagcctccgatggaaagtacttcttgttaaactcgtgtttgaaatccgcaaaggaccggacctcgtcccctctgcgtttctcgacggttaaccaccagttatgggcgtctccttcaaggaagtggaccacaatgtccctttggtaatcctcaaggcagcgggtagacttgaagttcctcttgagtctactcctccactcatcggctacaatcgggtccgtactgcccatgaagtgtctcgtgcccagccttgagatatgttcgagaacaactatcgcgagattctcaagccgacaaggggtgataccccttaacccaacacctagtcctagaaccaagcatgctctgataccaacttgaaaggccccaatccagactgcctaaagtccggacgagttctctcgacccaagccactaagtgactcggccctaaccgtttatgaggttctttcctagtctaatccgttccatatgattccgtgattcaatatatgacgcgaatagagtaaacaaccaatcaaatactttattgattaagcaaaggattcgatacaacctatgagtttgcatataagctattacaagtaatataatcgatccctagactatccgaactatcaccacccatcatcctggccttgagtctctcgcgcttaagccaagtccttcccacgatcaccattcgttcctgaaagtcatagagccataagtaatctcatttacttaatcatatgcaagtccatgcaatgctctatatgccatacactactcggatccgtggagagaattcagagaggggaagatcgcgcatcagtctggccgattctcggcaggtcagttaagacccgccggtcctccgccgagccgcgtcccggctcagccgatccctacccggaccgagtcttgtgtaggatgcacatgacccggaaactacccagccctctagtcgatcctttcaaggatccggctactaactcacatcctagaacccttagactcaaagtctaggatcccttaccttccttctcgaggttaggtcgatccgaccctccttctttattgtcggccacagcccggctaccgaatcctaagactatttattctcccaagagggagagagttttaatggtgagtttcttgtgttttcggtgtgttgtggtgagtggatgcttcccgaatcaacacatccgttccttgcacctttccaaagagttgcacctttccgaagagttgcgcctttccgaagagttgtatctcttcgcccataaccgcccagctagtccgtcactcgtccagttacctcgagctcgtccatcactcgtccagctacctcgagctcgtccgtcactcgtccagctacctcgagctcaaccgtcactcgtccagctgcccgagctggactgtcactcgacctgagtaaccgtcactccttccagctgagcttgagctttgggcgagctgacccaactgatttctttacgatcctagcttagcctgcatgatttctcctttgtccgagcttatggccagctccttctcacttgtccgagactccaccttcttctctcggaccaagtcctagccagcgatcctattgaggatcgcgggcgttaaagttcctctaaaagctgctttgaggaaaagtcttctagaaagcaggctttggagtgtagttggaggaaacctggttccctgtaaacctgttgccactgaagttgccatgtggctgcccaaacttcctgtatccctcaccatctatgtagaagactcattcctctgactcatggtcaggctcaatagtttcttcctcagcagcaaattagacatgcttcttccatgtgagcaagtatgaactgaatccagcttagcattcacctctgcgatctgatttcctgaaatagctctagcaatcttcttcctctcaaaatcagcattcttggtgctgttgctgcaagcaaggttctctatcagggctgtagcattagctgggtaacgtgtgttgaagttaccattgcttgctgcatctaaagccatctggtatctccaatcaactcctctgaaaaaggtacctagaagttgtacctcactgaaaccattatgtggacaatctcgttggtattccttgaaacgaacccaagcagccttgaaagcttcagctggaccttgtgtgaaggtagacagcttgtttctcaactcctcagacttagcatcatcgtagaaattgttcaagaaggctatcttgatgcttctccaagtcttgagggaccctgctttaagttgcttcagccaagaagctgcttccccagcaagtgaataagggaagagcttgcacagaaggtagtcctctgagactccattagcctggatgctcagaacaaggtcctcaaatctctcgatatgatccattggctgctcatgagataagccatggaaaggacgctggccaactaaagcaaagtagccaggcttcagctcataatcgttcctctagaatggtgggggtacaatcgctgatcaattagcatagaacaggtatgacctgttgaaatccccaagagtacgacgtggttccgcagctgaaggaataggtgcaggaatctggtgttggtgtcgatcgacacctctgttgtgtcattcgacaccgactgcatcggcgtgctgctcccgatggtgtcgatcgacacccagttggtgtcgctcgacaccgtgcccttctccatctcaagcagctaactgcgcattgaggcgcgcttgatcctcattggcgtcctcaggtaggatgagtccatgatcatccaatctctgaccagcctcattgtaggctcacccatcctcatctctcaaaactccttctgcagctctgatgaccctgtcagccattgctaatttctgagtttttcggttggtgcgttcaagttttcccaagtccagaacagacaagttgatatgctccttctgttttgtgctccttgtttgcctaggcatacacctgaaacacagaaaagaagaaaacaagaaacgcgtgagtaacaaaatagaagtaaaaactagacaaattcactaaacaaaactcaatgatgattcccaagaactccaacaacggcgccaagtttgatatggttcaaattacgtagaactactctctcaaataagagatcatttgcagtattttaggatcgaattcacggagttcttttgttcaaacaatgagttaaatgttgagattaagctaggagggtatgagtgaaatagtaagtaaacaaagtaaaaagacagcagattgattgggttgtaaacgattaggaaaagagctaggaacagggtattctcaggaaacgattggttagtagatctaataaaagctaggttgttatcgaaccattcttaaactcaaactctaattatggaataaccagtgggcgtgccgcgaaactccctatatctagagccaataataaccggagaagccgagaaactatcaacctaaatatgcattcttaacgagttcaattgttcatcttagtaaataggccgattcttattacacacctataaaccagactcatcaaataatagatccatatacagatacctatggcgggcatatctattgtctgtattcaagatctagttaattactctagatcaagcattaagcataatcaaagatgaagaattacagataacctagcaaagggggcaatctactaaaccatatgaatccctaatgagaaaccctattcctaacaagcagactactcatacatattgaatgaaacaaacgacataattgagatagaaagcataaacacaataaatagagaaggggaaaaaaaggatctcttcattgtattaaaaactagaatctctcaagaacaatggatgaatagcttatgtctctcacaatagggttttgcaaagaacttgataaaagactttatttacaaaacttaggtctaaaaacaatatatatagaccctaaaaacgtccagggactaataatgcacatagggaagtcttctgggcaaatttgagcttctgtaaactcgaaagcgtctagggtttttgctgggccgaaactggtgtcgatcgacacaaagagtgattcgatcgacactcctcgctgatttctgaaccaaaatcgtccttagcttccttttccttagcttttgctccaaaatgtctccttatctccattgttgtcccattacatagaatacttaaaaagagactaaaaagactcgagaaataacataaagactcaaaatcttatacctaaaacatagataaaatcggtgaaaatcgggttattgatagcatgttgttaagactatcgttcgcttgttcttcggtcgcattctcggttggtaccagaaataaattgccatcatcggtgatcatccactcaacatggttcgcttcttcactagataacgggtcatgatgatcatcatcattctccgaacattcagacggatcagattcaattgacatatcggacttagtagatttactatcttcggccataatttgatcattcatggccacagacaaactgtcatcgtccgtactgctcggcggagcaaagttttcggggttgggcacattaagaccgtgcaacgaactgactgtgttgcttcctttgctagacaacatctgcaaaacgaggtaaacctatcccccacttagccatctaaaagacgaacaaccggaatctaatgttgcattctgcgacttaaatttactcgataaaatcatcgaaaacccaagtgtccacgagcatcgcataaccatgctctgataacaaaaattgtaacgcccccgaattgccctatggctagacaagccacgggtgacacagttacgctacagtgaagttgatcgatcacaacttagtagaggttccagatgaatccggttctttaaccaaattataatcgaccttccacccactaggaacaccacttaggcttgccaaccctcgtgatattatagtgttgagcgacccggactaggtcttatatcattaaacactcggctgcctttaagaaaacattttatgcatagtatatagcttatacttggcaaagagttacccaaaaatatatctttatatcggatccttgttaaaatttacataataacaagtaattttgcagaagcaacgtaaaatatcctattgcagaagcaacgtaaaatatctctagtctgaaacaagttattttgcagaagcaacgtaaaatatctctagtctgaaacaatgtttcctcgaccatgtgcaaggttttatcgattcaggcaagtttttcttagtttcggtcgagtttttaatcggacagccttttagtctctctctcttgccttcaaaaatgaaactaggcggagagagctctatttataatccgcccaaggttggccatgcattaccgcccgctgccacaagtccggacagctgccgcgcccacaggcgacaggtgtctcgaacgacagcgtggtgacaggtggcaacgagtgtcactccaccacccatcaacttcggctccaagactcagctgacttcgtctccaagactcagctgacttcggctccaaggttggtaacttgagccgcaaggcaccgcgagtgaggtgtcctactcatgtcggttccgcggccggtggggcaaacttcaccgtggcacgcccttcttttcccatctttgcccattcgtgcccattcttgccctttgatgttttggcaccgtttggacacacgcggtcaattggctttgcattcgggcaaaagtttctcatttggtcctttggccgtgcctgatgcccttatgggggtcactacataggccctagccatgaaatttataaatgtttggtaacatgttgtgtcgtaatgactgataatgacttaatcctagtcggcacaacacttaaatatcgcgagggttggcaagcataaacgatgtttaagtgggagagtggtcgtctatacactggccaagggttgggattggttctcgaacctcggttggatattgatgatcaatctcaatgtggcatttttggggagcccgtgacttgtccggtcatagagcatctcgggggcgttacagtccccggtgtgagaataagcattgggatgaatacgtgagaaagataagttataatcaatgtcaccttgtatgtggtgactaaccggatggtctttctccttgcttaacatcggccatactcggcttagtgaggtcgaattccatgatattgatctccattcgcttcttccttgaaacaaaaacctaaaaccactaatagctttaacgaaacaaaataaataaaaacatacctaagataaattgatattgttgtagtttatacgacaacaaataagatcaaattcgtggtgacggatggtgtgaatggatggtgggcagttgcgggcttggccgaaagggtggagtgggtgggcaagtaacgtccgggtgttggatggggtcgccgggcgttgcgatgggcagaatggtcatgtgttaaacgaatccattggcggaccgatcggtcgtggtggtgaaactccccttgtccattcacgtgtttgcccgagttggccaagtcttgcccggatgagtttgcattcggccggaccggtgggcaagttgttgcccgggctgccaggtggggcaagtctggcaaaggcgtggcacactccggcgaggtccggcgggtggtcggggcgcattggcaaactctggccaagtgatggcgcaaatcagcgtgctctggctaagacttggcatggctgggccggcttttcctggcggcaccggttactcgggcgagtagatgggcctgttgtcacggtgcctagtgactggtccaagtgacccttcttccttctcttctttttgggtttttctgttttctatttttctatttttgtttattttataaaatctgaaacaaatactagaaaggttaaaactaaaagcaaaataaaaatcccaagggaaaagtagctacctaaagggttgcctcccacttagcgcgcttgtttaacgtcgttggctcgacggttgggtcttactaggcgtggtaagataggttgtttcgccctaggcgacctttctttgattgaaactccttgggaggttcttccgtgctctcgccatttgacctccttctcctttttgagcccggggtaaacggcaccatcttgtggaacacttcatcatcgatgttggcgaagaatactgtttgattaagccaatccattatagtgaccgctgtggctaggaacccacctcctagtatgagttgagagggtcttcctttctcgacctttatgacatggaaattggtcggcacattgcaccttccaacccgaacatagacgttgcagactatcccttcgggaaccatgaaagacgagtctgcaagtccaattcgcacatccaaaggttgtagctccttgattctaagatccttcgatgtctcctttgtcataatgttgatgcatgatccaaaatcacatagggcatccttgaattcaacacatcgtatagaacaagtcacaaggaatcttctcgggctctctatctttcgaagagtgttgaacggtttcaagtggtgtaaggcttcctcgtacaattccttcatctctctccttgtttcgcaactctcaagaaagaaatggtcaatatggtaaaccgaacaagctttagagaaagggatacctcgaggtagcttagaaacggctcggttaaagtctccaagtcttctcaagcttatcatgcgtggatgccactggtcttctaggagagtgactggttgtaaacgcttgtcctcccgggaggatcttcattccttttgtcgatttcatcttctttaaggtcgtgaggatctcggtaagttgtagccgcatcgcaaagcacatgggggctagagtcttcttcttcgctctccattggttcatgcccttctatgcatgttattaggttatcaactttctggtccaaatcaagaattctatcaagcaattccacgtatttccttgaggattccatcgtcactatcctaagtgatgcctgtatccttgattgatcatcaacgttcttgacttggttctcctcaacttcaccttgtcttcttatcacgtcctccaaagccacatcttctttcgcgtcattatcttctagtcgattaatgcgcgtttgaagcctccatctgctatcatcgacgccttccatcctggattggattctccttaggtcatcttggctaattgaagagaattcttcacctgggcgaggtgacaactcacgtttgtctctcggttcaagatcatccccgcccgcggcaaggatggtcttttctgacaaggtttcgtgaaataggttttgccggtagcttagaccagcatcctcctttgttcctcatagaaactgtaacgcccccgaatcgctctatggccggacaagccaagggcaacccgaaaacgccacattgatagctcacacggacaacccaacttaggttccaaatggctttagacccttagccagattatccacatgaacatccctcacgaacacggtttaggcttttcaacccttgccatgatcgtgagttatgtcagtctagacaagactaatatcgcatgaaacacactcaactatccaaaacgtttcaacaatgggcccttcagcatacacgctcaaatccaacaaaaatcataatcattaagtttttcaaaaagttacaaactctatactggctttcctacgtcctgagcatccctctaatggttcccactaaggtttcctgcaaaacaaaatggaatcataagtaatctaagattacttagtgagctcggtctacctgcaacagatattagttccccatcccattatcataacccgaaacatgcaacagagaataacaacaaaaggcaacttaccgaagcatctaccaaaaatatgcacatgcaactaagactccagttttattaagtttttaaaagggccttatatgctgccttcaaacccaacgccaaacacacacactcccgtgatctcccgcgttacaaccacaaaggtatgcaaccggaacatcactaccaaacgctacaccatcgtgtagacactcggccagggtagttaggcccgtctctccaagttctccgtacttcatggcgatcaagtaacaacgttacaagaccccagaatagcacggttcactacgaaggtcagacataccacaatcttgatacgcttatggtctctacctcctaccaagagcaccacgtactaagacccaacatttaagatattatgagacatatggttactcaaactcatagaatcatcaatattcttactcatcacaacctcccaaacctaacccttaagcataagaatctaaaagatctcatatgcggcttagtaccatcacaccattagttaatactcatataattcatgaaataaatcaatgaatgcaagagtatatgatcatgcaaccaaacaagcaatcaatcacccaaataaacactcaaacctatcatttgccatatcacacgcttcgagactcacagagattcggttgaaggtttaaggttagcttcaacgattctcggacattccatggcttcccaatcttgatcccagctcaatttacctctcttcatcttgatctaacatctcttgatagaagcaaccttgattcatgaagctttactctgaacacacatttatgggacgggttcctcggaaggttctcgatcggacaggataacagcatggatttctcgctcatgggcaggaattctcgatcacggacatgatttcttcactcacggtcaaagaatcgcagtcacgggcagagtttttcaattgtgggcaagttttctctcgattacgggcgatttttatgagtcgggcagccattcggatcactctccattctcccatcaaatggctcgagtttggccaagcatttataggtggaacagcttgggctccaagcaaacgcatgtcatctggtggtgacaccttgcgggacacatgtcgcccgcccgtgaagacacatatgctgcaggaatgggacgatgacacgtggaaggggaaacttcggctccaatcctcataattttggctccaagcaactttcttgggctccaagtaagccagtccacgtgtccatggcgcggtcaaagggcggtcaatgcccgacagggcaaattttcgcccgtggaacgcccgtattgcccaatcttgcccatctttgcccattattgcccaaatagtaatatcttttgccctttgatggtttaacactttttgggcacatatgggaatcgaccatgtacccagggcaactttctcccggatgaccccatctcgaactagagttaaccatattcattcttgccttgatcgtctctttggatttcgttccttaactatttattttctctttcaggtcatcctcagatgttcctcgatgtttttccgcttgggcgtttaccccttagcgagggtcattacattctacccctcccccccccttaaaggaatttgtccccaaattttatcttttgggcatctccttcttcttaggtttctcctgacactcgctcataagattcttaagtccttctccatgtaatgctccttctcgccaccttggacaacttgattatcttcactatcactcattgcttattattattccaccttctcttgaattcgtctcgccacagttttcaccaatccctagtctttcatttggctgaatcgctctttacataatttcagctattgaaaacttctattctcgtcttgatggtaatatcttatccgaaggtagagataactcttcccacaagtttcttgctttgtcaatatttgataccacaaactactccattctgagaaatccttaaatcataaaagcttaagttggagtgattaggaaagcttcttcatctctagcatcttctgactctcttatattttttaacttcttggggtacgaaggttacttccttaatgtaccatgactcaagccatttcccaactgaattctcactacttgaacatttatctgaccggtaaagagattcttcgatgtttaccacagatacttcaactactcgcttctccacaacaagggttcggcttcagggaacagttcaatctaatgactactccaattaggaaggcaccctcaacaattacacacaaaaacttgggatcactcaacactccggagtcgaccccactcaacacggatgcatgcataatttaaattaagcaactaatctaccaactattcacacaatcacacaatcacattcaagagaataaataaaacccatacgtaccttatctgagactcttaaggtcaagaaggcttagggtaaatctatttctatggtttaactctcactcagtaacttgataccttcatgacttcccgatcgatagactggccggggtgacggaccgttgatgactccttcatctttttcaacaaaaagacttgacccattcataagttctcaaacacttccttaactcctctgactattcttcccataaccaacttttctctggtttcttctcaggtactttgatttgtccccatcattttaactttgccatttcctttaatgacttggatcattcttcatatatcatcctccgatattaactccaagacttgattccgtggatcattgtctctctactcctttaatgcttacattcgattgttttccttttcggtacgacttcctttcgttctcatatttacctttacgatacctccaatcttaacttcgtttaactgatcatcttctttgaatctacaacctcctcatattttgtacacttctccctttagcggcttcagttgaactacttaactcatcactcttctttaccgactttctcctttaagttttggatctttcataccttgcacctttactcgctcgataatctttttgcattatctctatcttgatcatcccgcttacacccgtttactctctgatcatgtatccttcttcgaacattaccatttgatccttagacgcagttttcttcccacatccctccgataacgatattcctttgatcaaacttcaccttctcagtttttgattcacctcaccttgtcttactacgcctcctttttccctttataatgatcccaaaaatatactccatctcctttctcgaactccatcgttactcaccatatattgatttgtgatcaccacctatgtctcttaaatggttttgctcccccaatactcaatctcttcttcacccactacttcgatgtgctgcttactcttcatttaagtgatctccaataactttccttctaatcacttacttcttctcagcttcatcacttccctcatgcctttctccgattaataagtcttgctcatcattcttccaaatgatttcattcatcttccgttttcctccttccttagaaatgatctttacaccttcggctcttgtcctctgcaactcgcatctcatcacccaccttggctcttactctttctctaaaaatctcctcaacttctccttcactatttcttagttttctccgaaacaacttacctgcttccccttttgctctcacttgagttacaagcccttgttactgagctcgaccaggattcttcaacactttaaatcttggttgcggtcccccacgaccatccattctcaatccaatccaaacgtacaactacaacaacaacaagggcaatacctaacccattccccactaactcaggacatacaagtttacctagttgcttttgcgactcatttactcgataaaacttttagaaaacgtgtgtcccgtgagcatcatgaaccatgctctgataccaaaacgccctcgaatcgctctatggcctgacaagccaagggcaacccggaaacgccacattgataactcacacggacaacccaacttaggttccaaatggctttagacccttagccagattatccacatgaacatccctcacgaacgcggtttaggcttttcaacccttgccatgatcgtgagttatgtcagtcccgacaagactaatatcgcatgaaacacactctttatatgaaaataatcttttataatatataaatttctcagacaaccaagtatccaaaacgtttcaacaatgggcccttgagcatacacgctcaaatccaacaaaaatcataatcattaaattttgcaaaaaacaacaaactatataccggctttcctacgtcttgagcatccctctaatggttcccactaaggtttcctgcaaaacaaaatggagtcataagaaatctaagattacttagtgagctcggtctacctgcaacagatattagttccccatcccactatcataatacgaaacacgcaacagagaataacaacaaaaggtagcttgccgaagcatctaccaaaaatatgcacatgcaactaagactcctgttttattaagtttttaaaagggcccgatatgcaaaacatcaaacccaacgccaaacacacactcccgtgatctcccgcgttacaaccacaaaggtatgtaaccggagcatcactaacaaacgctacaccgtcgtgtagacactcggccagggtagctagccccgtctctccgaattcttcacacttcatggcgatcaagtaacatagttacaagaccccacaatatcacggttcactacgaaggtcagacataccacgatcttgatacgcttatggtctcttcctcctaccacgagcaccacgtatcaagacccatatttaacatattatgagacatatggttactcaaaatcatagaatcatcaatattcttactcaccacaacctcccaaacataagccttaagcataagaatctaaaaaaacctcatatgcggcttagtaccattaattaatactcatataattcatgaaataaatcaatgaatgcaagagtatatgatcatgcaaccaaacaagcaatcatgcaaccaaacaagcaatcaatcacccaaataaacactcaaacctatcatgtgccatatcacacgcttcaagactcacagagattcggttgaaggtttaaggttagcttcaacgattctcggacattcgatggcttcccaatcttgatcccagctcaatttaactctcctcatcttaatctaacacctcttgatagaagcagccttgattcatgaagctttactccgaataaagacgggttcctcggaaggttctcgatcggacaggaaaacagcttggatttctcgctcatgggcaggaattctcgatcacagacatgatttcttcactcacagtaaaaaaatctcagtcacgggcagagtttttcaatcgtgggcaagtttccaatagtcggattgactcgaacttgcagtacttatcaatcaagcaataatcaagagaaatatagatcatgactcctaactaaactaaagaaaacgtttattttttaagacccaataaactcaaaaacggaaaataataagaatcaaaaataaaaccaatattagtaagaacctccccagtggtattaaaatccagagaaatcgggaaaaataaatcaaaaatgaaagaaaataaaagaaagggaaaagaaaaatcaaacttgtgggttgcctcccactaagcgcttgttttgagtaaataggttgactctgtagttgcttaatcaacaggtggatcctgaagatccaaaggcttttctactggaatcttggcttcagcccagtagtgtttgactctatgtccattcacagcaaatggtttttcattgttgtttttgagaatgactattccatatggcctaaccgagtggactatgaagggatctgtccaacgagaacacaattttccaggaaatattgtcaatctagaatcataaagaagtacctggtcattaggctcaaaggtccgagtgaggatcttcttgttgtggtaagcttttgtgtgttccttgtagagcttcgagttgtctaaggcgtgaattcataattcatcaagctcattcaactgaataagactcctttctccagttgatttgatgtcgaaattcatcatcttgactacccaagctgctttgtgctctaatttcactaaaagatgacaagctttaccatatagaagatgaaaatgtgtggtcccaagcggagttttgaaaactatcttgtaggcccacagtgcatcatctaacttgtaggaccactcctttttcgctttacccactgttttctcaagaatctctttgatttgcctgttgcaaacttcaacttggccgctcgtttgtggatggtagggagtagcaacccgatgctgaactccatactgtaaaagcaatttcgctagaatcttgttaatgaaatgcttacctttgtcactaatgactatgcgtggcactccaaaacgagggaagatgattaacttgaagagtttcatgacaatcgctaaatcgttctttggactagctatagcttctacccatttggagacataatccacagctactagggtgtagagattcttgttggattgcgggaaggctcccatgaaatctataccccaacaattaaagacttcgacttcgagtataaatttctgaggcatctcattacgcttgctgatctttccccttctctgacaagggtcacattgcgatatgaacttctgagcatcccgaaacattgtaggccaccaaaagcctgcttgaagaactttggatactgtgaaatgaccaccatagctagagctgtgacaatgcgatagtatatgaaataacccgattttcactgattttatctacgtgttaggtataagattttgagtctttatgttatttctcgagtcttttttgtgtctttttaggtattctatgaaatgggacaacaatggagataatgagacattttggagcaaaagttatgaaaaaggaagcttaggacgattttggttcaggaatcagcgaggagtgtcgatcgacacactcttggtgtcgatcgacaccagtttcggcccagaaaaaaccctagatgcctccgagtttacagaagatcaagtatgccccagtagatttccctatttgcgttattagtcccttgatgtttttagggtatatatatattagttttagacctaagtttcttttatcaagtcttttatcaagttttctacaaaccctattactgagagacataaaccagtcgtcgattgttttcagagttttattcagatctatatatagtgaagagatccattctttccccttctctatttactgtgtttatgctttcacactcaaatatgttgtttgcttcatccaatatgtctgagtaatcttcttgttaggaatagggtttctcattagggattcatatggtttagtagattgtcccccttgttaggttatctgtagaatttttcatctttaactatgcataatgctagatctggagtaattaactagatcttgaatccagacaatagatatgcccgccataggtatctgtagttggatctattatttgatgagtctggtttataggtgtgtaataagaatcggcctatctactaaaatgaacaattgaactcgttaagaatgcatatttaggttgatagtttctcggcttctctggttattataagctatagatatagggagttttgcagcacgcccaccggttattccataattagagtttgagtttaagaatggttcgataacaaccttgctttcattagatctactaactaatagttaccctgagaataccctgttcctagctctttattaaatcgtttacaacacaatcaatctgctgtctttttactttgttctcttttattttcactattaccatgctagcttaatctcgacattcaactcactgtttgaacaaaagaactccgtgaattcgatcctaaaatactacaattgatctcttatttgaaagagtagttctaggtaatttgaaccatatcaaatttggcgccgtcgccgaagttcttgagaatcaacattgagttttgtttagagatttcgtttagtttttacttctattttgttacacacgtgtttcttgttttcttcttttctaagtttcaggtgtatgcctaggcaaacaaggagcacaaaacagaaggagcttatcaacttgtctgttctggacttgggaaaacttgaacgcaccaaccgaaaaactcagaaattagcaatggctgaaaaagtcatcagagctgatgcagaaggagttttgagagatgaggatgggcaagcttacaatgaggctggtcagagattggatgatcatggactcatcctacttgaggacgccaatgaggatcaagcgcgcctcaatgcgcagttagctgctagagatgtagcagggctcggtggtgagcgacaccaactaggtgtcgatcgacaccatcgggagcagcacgcggatgcaatcggtatcgaacgacacaacagaggtgtcgatcgacaccaacaccagattcctgcagctattcttccatctgcggaacctcgtcgtactcttggggatttcaacagaccagacctgttctatgctaatcgatcagcgattgtacccccacattccagagaaacgactatgagctgaagcctggctactttgctttagttggctagcatcctttccatggcttatctcatgagcagccaatggatcatatcgagcgatttgaggaccttgttctgagcatcaaggctaatggagtctcagaggactacctactgtgcaagtttttcccttattcacttgttggggaagcagcttcttggctgaagcaacttaaagcaggttccctcaagacttggagaagcatcaagatagtctttttgaacaatttctacgatgatgctaagtctgaggagttgagaaacaagctgtctaccttcacacaaggtccaactttcaaggctgcttggatttgtttcaaggagtaccaacgagattgtccacatcatggtttcagtgaggtacaacttctaggtacctttttcagaggagttgattggagataccagatggctctagatgcagcgagtaatggtaacttcaatacacgttacccagctgatgctacagccgtgatagagaagcttgcttgtcgcaacaataccaagaatgctgattttgagaggaagaagattgccggagctatttcaggaaatcagatggcagaggttaatgctaagctggattcggttcataacttgctcacaaggaagaagcatgcccactttgcagctgaagaagagactattgagccttagcctaagtcagaggaaggagtcttctacatagatggtcagggatacaggaagtttgggcagccacagggcaacttcagtggcaacaggttaacaaggaaccagggttcctccaactacactccaaagcttgctttccagaagacctttcctcaaagcaactttcagaggaactatggtaattcaacttaccaagccccccccccccctccaccttcagcagagacaagaatggaatcgatgcttgagcagattctggagagccaaacaaagcttgttatggagtttattgggaagtttgatgttgtctatacagatattaatgggaagatccataatctgagctctcacttgaagaagctagatgtataggtagctcaaactgcacaatctatcaagagacaagagggctttcttcctggtaatcctgatgctaacccaaggaagagctgcaatgccatcttcatcagagaaagagatgatgtgtgggaggaattggacacttaagacgagttggagctcgaagttgcatagatggtgtcgaccgacaacctccagtgttgatcgacaccatacgggacccttttctcagagacgactcaatacgacggtgtcgatcgatacccatccagtgtcgatcgacattggatccggactacaccttgtgaggtgcaggtacctatgcagcccgagtctgtctatactcctcttgtctcgtatccaaggaggcgtcgttctaagcaggagattcatgctggtaagtgcacaaccataatggagaagatcctccatactcttcctaaggatgcttctgagacatctatgtttcattcaataggtatgtcaagcgacttgttgacaatagaattagctcggatgaagctaagcttcttaccagagacatcagtgcaatcatgccgcctaaggccaagaaggagaaggcacaaagagtagacatagctgagtacatccgcaccattactcctggacagcccactgagaaggttccagatccgggtagctttgttcttgattgctctatctccacaagcaggttcagccgctctttgtgtgatctgggatccagcatcaacgtcatgcttaagtctgttgctgagagactaggcatgactcactacagacctactcgcatcactcttcctttcgcggatcgttccaagcgaatccttgaaggaatccttgaagatgttcctgttaagattggtaactctgttatccgtgctgattttgtggtcctggactatgagaaggaacccaaggatccccttatccttggaagagcattcctagctacagctggtgctaggtttgatgtgaagagagggagaatctctctcaaggtttgtgattcggagatggagtttggcatggatggttcagaacttactaagcctattagttgcattgcgtccagcatagacacacctccttagactgatcagaatcccaccacagagccacacacaacgctccaacacgttgagctcgttaatgagagttgcagagcaacggtgttgatcgataccactacccctgtcgatcgacaccctcgggtttcatagacgaaaaattctgcacattctcttcaacccacaccactcatggacctatgtgataagttctcttctctctcttctcctgtttatctttgattaattctttggattattcaaagactgcttcacaagataacaagcctagagttccttcaaagcttgtttctcctgttgcttttgcaggtgacgagaagactgtcgatcgacacacccctgagtgttgatcgacactagaagctgctccaaccagatccgtttacacaccgccttggaaggcgaggaggcagcaacaatcctccactaccactccacccacatcctgaactccgccaagtcaagcgattgactcaaaacaagcgcttagtgggaggcaacccactagtttgatttttcttttccctttcttttattttattttatttattttatttatttttaccgccttctctggatttgaatgtcactggggacagtgtcgtttaagtctgggggaggttcttactaatgatgcttttatttttgtttcttattttgcagttcatttggttatttctttcccttctttccaggaaaaaaaaaaaaaaaccttttctttagtttagttaggaatcatgatctatatctctctcttgtttattgcttgattgatgagtgctgcaggtttgtgtcaatccgactattggaaaatctagatggcaaagaataccagatattgagaccaatgtgataaaaagaatatgttcctctccccttataaaaagaaaaatataatgagagattgagacaactttcagatagtgtataggggtaggaatgtttcctatgaccccgtttttatacattatttggaataatcaattacaaaggttggaaaaatgtcgagggtgtcgatccagtatgcgagttcccctttgtttactctctaaaaagaataagtctggggagagaaagaacaccgaaaaagaaaaaaatatataaagaatggtcaatttatcatggtatagtacaggaatgagtctagaaagatcttgaatgttggcttgtttgatgagacccaacgatgaaagcctggtgggtatagttgtggaacttaggcatggaatctagaatgttgtgtaagcttgcagagaagtacatgttggttaggatttgattaaacttgttaggcatatggacttagtttggatgatcatggcaagaggctagagaatgttgggagttcctttgttttcaaaacctcttccacgggtttggcttttgtgttttgcttgagggcaagcaaaagctaagtgtgggggagttgatataacctaattttcactgattttatctacatattaggtataagattttgagtctttatgttatttctcgagtctttttagtgtcttttaaggtattctatgcaatgggacaacaatggagataaggagacattttggagcaaaagctaaggaaaaggaagctaaggacgattttggttcaggaatcagcgaggagtgtcgatcgacacactcttggtgtcgatcgacaccagtttcggcccagcaaaaaccctagacgccttcgagtttacaaaagatcaagtttgccccagaagatttccctattagcattattagtcccttgacgtttttagggtctatatatattgtttttagacctaagtttcttttatcaagtcttttatcaagttttctacaaaccatattactgagagacataaaccagtcgtcgattgttttcagagttttattgagatctatatacagtgaagagatccattctttccccttctctatttactgtgtttttgctttcacactcaaatatgttgtttgcttcatccagtatgtctgagtaatcttcttgttaggaatagggtttctcattagggattcatatggtttagtagattgtcccccttgttaggttatctgtagaattcttcatctttaattatgcataatgctagatctggagtaattaactagatcttgaatccagacaatagatatgcccgccataggtatctgtagttggatctattatttgatgagtctggtttataggtacgtaataagaatcggcctatctactaagatgaacaattgaactcgttaagaatgcatatttaggttgatagtttctcggcttctccggttattattagctataaatatagggagtttcgcggcacgcccaccggttattccataattagagtttgagtttaagaatggttcgataacaacctagctttgattagatctactaaccaatagtttcttgagaataccctattcctagctctttattaaatcggttacaacaaaatcaatctgctgtctttttactttgttctcttttattttcactattaccctgctagcttaatctcgacattcaactcactgtttgaacaaaagaacttcgtgaattcaatcctaaaatactgcaattgatctcctatttgagagagtagttttaggtaatttgaaccatatcagtataccaggaacctctgttgcagcaatgcatctcctataaactccatcagaacaatgcttatagagataaggttcatcccaataatatcgcctaatttctcttaggaatctcttcttgttgtaatctgtgaaattatccggttccacatctgcagctaggtaattaataatatcaccataccatgggttatccttctcgatcgctgtgatggtgcaattctcagttggtgaccaatttcttgtcgatttagaagggtgtcgatcgacaagtgtagtggtgtcgatcgacaagtgtagtggtgtcgatcgacaccatcgcgcaacttcgaatgtctacttcctctgaaatgtgagtgtcgatcgacatagtaagagtgtcgatcaacactgaagctatcacgtttgcagtcatcttcttcagttgtatcaatcatgtataagttctcttcaggcaagaaatcgtttatagggacatcatcatcgatcctaatgcgtgataaatgatctgctacaccattctcaactcctttcttatctctaacctcaatgtcaaattcctgaagaagcaaaatccatctcaaaagtcttggcttagcatctttcttttgcatcaaatacttcaaggcagcatgatctgtgttaacaaaccttggatccaacaagataagatctgaatttctcgaaagcaaatagcacagctaagaactccttctctgtagttgcataattcctttgagcatcatcaagagttctacttgcatagtagatagcatgaagtttcttatcctttctctgtcctagaacagctccaactgcaaaatcactcgcatcacacattacctcaaaaggtagatcccaatctggtggctgaacaattggtgcgctgatcaaggctagttttatctgctgaaaggcatcgtaaaactcttgtgtaaactcgaatttgacttctttacagagtaaagcagtcatcggtcttgcgattttgctaaagtctttgatgaatctcctgtagaaaccagcattgccaaggaaactcctcactgctttaacattatcaggcgcttgaagacttgtcataacttcgatattagctctatcaacttctataacatgctcagaaattctgtgtccgagaattatctcatcctgcaccataaagtgacatttcttccaattcaaaactagatgtttctcctcacatcttgccaacactttgtagagattctctaagcaatcctcaaacgatgatccataaactaaaaaatcatccatgaaaacttccatgatatcctcaatcatgtctgtgaagatagacatcatacctctctgaaatgttgtaggagcattacaaagaccgaagggcattctccgataagcaaatgtaccataggggcaggtgaaagtcgttttctcctggtcatctggatgaatcgggatctgaaagaatcctgagtatccatcaaggaagcaatagtacgtatgatttgctaacctctccaacatctgatcaataaatggtaaggggaaatggtctttcatggtagcaacattcagctttctataatcgatgcacatctgatgacctgtgattgtccgagtaggaattagctcgtctttctcattcttgactactgtaacatctctcttcttaggaactacatgaactcgactaacccaactgctatctgaaattggatagataattccttcttccgacagtttcataatctccttcttaaccacttctttcagattcggattcagccttctctgatgttcaacgaagacttagactcatcctcaaggtgaatcctatgcatgcatacatctggagatatacctgcaatgtcatcaagagaatagccaagagctttgcgatgattgcgcagcttgcttagcaataaggtgagctctgcgggattaagagaaacattcacaataacatgataagtagaattttcaccaagaaaagcgtaccttagccctgctggaagtggtttcaaatcgatttgaggagcctttgctggatcccaatctgaattaatagtcggtgttggaatcacagatggaagagcttcttcaaccgtaagttgcatcacatgttctgtctcatcttgcagcttagtatatgtagaagtttcactgtccaaatctgcactatccactatggaagagaccaaaactcgctctagtgggtcttctaattccatctgtgaaatactatctgaagctgatgaagtgaaagaatctatcaagaaggtttttccttctatgatcggtttcttgaccaaagtgttcatattgaactgcatagtaagattgccaacattcagccctatcctcccttgtcgaacatctatgattgctccagcagtgtgcaagaaggatctcccaaagattaatggatccttaggttccttctcataaggcaagactacgaagtctataggaatcatgctctttccaatcatcccgggaacatcaataagaattccatctggaatccgggtagaacgatctaccaacacaagagtgataaaggtaggctcaagattggaatacccaagacgcatagcaactgaacgaggcatcagattcacactagaaccgagatcacataaagttcttggaaaggatcgtgattgatggtgacactaagtacaaaagttccaggatcacgtagctttcttgggattcgttcctgaatgatgtcgctgcccctgctctgaaatcatcatagcactgcattctttcgtcaaattcttagtgaccattggcttaacataccttctaattgtgggagatagatgaatagcttcaactagagccatctcaacaatcagtttatcaatcataactttgcatctgacatcatctaaggcttgtcttgactttttaggacttttggggaagggaattcgccgatttgctgacttggttgcagctggaatttagacattgtctgaacgagctgggtgtcgatcgacaagagctaagtgtcgatcgacaccatcgggaatagtttcctcctcctgcgcgaaattgtcgattccattcgacaaaggaaaaacagagtcttctagagtaattggtgtcgatcgacaccctggtgtatcgatcggcactgattcattgtatgcaattggaaaagatgaaggctgagctgatcattcgcgctgaagtattgggttgagctgctttccactacgtagtgtgactgcattgatagaagttgatgtaggtgaaagattgtagaattgagagcatagattgtcaatcttgctattgagatctgtggagagagaatcatagttgatatcaagctttgtggagagagaatcatatttgctatcaagctttgttaggcctgcaagaagatgcacaagcatagactccattctggtctctgatgagggtggaggcggggcttggataggagtagaaattgcgaaaacaggagtctctttgctcttgatagctttctcagctgaaattcttcgttctttgtcaaatccctgcatcgaaagacaagttaaagcattggtgatgaggagtaatgcttcactagtagttcttgtcatgaagttacagtagctcgctacatcaatttgattctggtatggcttgtctattcctttgtagaataggttgatgagttgggtctcttggaagccatgttagggacattcaagctgataagacctgaaacggagccaagatgctctaagggactctgttggtgcctgagtgaatgaagagatttgcaaacgaattgcctctgtcatggattcatcgaagaagtgattcatgaatgcattctttgtatcagtccaattggttaatgaacctggttccagttgacgcaaccatgatattcctctgctcgcgagagagtgggggaagagtttgcaaagaaggtcatcagcatggtaacccttctgctttaatagaggaaacgatgtctacgaagacttccaaatgatctaatggtgattcgtcgggagctcctctaaactttcctcttgatacaatatcataataggcagggtgtatagcaaagtcatctctttctaatggaggtagcttgaatgctgatcggtttgtgtagaagaggtcaattctgttaaaatcgcctattgtagcagtctggttctgcagagggtgtagatcgacaccctgatggtgttggtcgacataaccgtgaaagtctgccatgggaacgtgattctcaatctgaaggtacctgaaatacaagagaccaaaagacaaagaaacacgtgaataggtggtagaaaagtagtatctagacttaatatgacacctagtctaatggtgaactaaaagagaacttcggcaacgacgccaaatttgatatagctcaaattgccttaagcttactccctcaaataaaagatcgtctttagcacttaagggtcgaattccactgagctctcgatgctcacacaatggacttatgatgttgtttaataagctaaatgaagtaattgaatgtaaaagacaaataagcaagtaaatgagttgtagattcaagtgattaaagcatcgagtctaaggaattgtctcgggagatatataaattgtagatctagctaatatcaggattgtaatcgcacgattctcaaactcaaactatgattctagagtaaccggtggcgttccgcgaaactctctatacttaaagctaagataactagagaagccgataaatcctatgctaaagtatgcattgttaataagcttgattaattcacctagtatctaaaccagagcccttctatgagcctacctgttctttcttaaacactacaagaaaacagtcgatttgcaagggaagaattactcgctaatccctcgcaaacagctaaaagcaagggatttgtgaggaaaacaagttcctcgcaaatcgcttctcgcaaatggtaaaatatcgcaattccctcgcatattttgcgaggaactgttttcctcgcaaatcacacgcaattatcgtactagtacttccctcgcaattactgcgacggatttgcaattcttttttttcgcctagcaaatctctagcagaatttgtgatggatttgcaagcgttctgcaatgttttctgatatattaagacttgattagtgtctgattagcctctaattacctagttaattagttgttaattagagatgattttgtatgcaattcaaagctgaaatttcataaaaaaacttgttctaaagagataaaacacacaattgaagctgaaattgcataagtaaaaaatgtatactaaattgtttgaaaccataagaacttgttctaaagaaagagataagaaggcaaaaaagaaagacaatgttttcaaaatacagttgatggaggagaggatcctattgcaaggttagctagggcagcaactgttgtctcctcattagccacctgctgttctggagcagtagccacaggtggagcatttgcgttggcctgtcctgtctgtgtcgaggaaccacgtcgaagaattgcagctaaagcaggatctttatcagcaagatagtcaaacaggatgtcgaagctattgatcctctcagcctgagattgaatgcatgcttcagcggcagccagcttctgagaaagtataaccggatcatcactaggaagcgttggaccactatgggctgaggatgcttcaaactgcagagatccaaccccataaatcctttctttctttcgtggagcaacctgcaaagattacaaaaacttacaaggacacaacaaaaaaaccatgagaaacaaagttcaaaagaattcagacacaaagtataatgaataagctgccaagattacgagaactttatatcaaacactagagacacaacacaaacatttcagacaagtacacaacacaaacacttcagacaagtacacaacataattcagaaaagtacagaagtacacaacagaacagaattcaactgccaagtacacaacataattcacacaagtacacaacaaaatcagacaagtacacaacacaaagaattctgacacaaagtataatgaataagctgccaagattacgagaacttgatatcaagcactagagacacaacacaaacatttcagacaagtacacaacacaaacatttcagacaagtacacaacagaattcagacaagtatacaagtacacaacaggacagaattcagctgccaagtacacaacaaaattcagacaagtacacaacagaattcagacaagtacacaacacaacaagctgccaagaaaaagcacagaaaatttacctcagtaaaaatcttgttcttggcatgaaaagataatccacctgatccagtgctctccggattgtccagtgagcacatatgagactcttcctcttctatcctagatgtcacttgcttgtagatctcctctgacttcccatcgatgaaagttccatccgcttttctgtgtgtctcatctagcagctcaaggaaatcaggagttgtttctccagtttctcacactgaaacacaaagagataaacaagttagattcataacattgtagattaagtaatggtaaggagagaagactacttatcttacccgttttcttgcacgagctttgtatgaggtctggcctgaacggtgtttatatatgcccttgccttccggatcatgatatctagcatttctgctgttggtactctttttttctgacttaggatcttgccaaaactgtactagacctttccacacatcaggatcaatccattttggcttggcttcatcacccttctccttccaatttcccttccatcgtgacacttgatcagacatcctagactttagctttgcttcaaactcaacccttactcttttgttaattgaacggtcccagttatatacttgctacaaaacagacaaagcaaacatcaaactatgaaaccaaacaacaaaacaagcataaacatcaaaagagcacataacttaccgcaaacgtttcataccatcgatcgattgtagcctttgatgtctgtgaccaattggcatgaggctctttgaaatctttttcacataaggatctctatgtctttagaagtctctggaaatgtttgtacttctaagaaatctctttgaaacctcttctaaaaaatctctttgaaatctctttcacataaggatctctatgacgaggacatcgtcaaacctacaacaacaacaacaaaacacataaggatctctatgtctttatacttctaagaaactacaatgctaagtacaaccaagctaattccagagacttctaaggcagaaacaaacttctaaggcataaccaacctaattccagagacttctaaggcaggaccaaacttttaaggcagaaccaacctaaatccagagacttctaagggagaaccaaagttctaaggcagaaccaacaaccttacaagacctaaatctagagactatgaatttaaccttaccagagagttcccgtaggacgctttgggtcttatcttgtcaagccagcacgaccaggactatcgaggagctcttccagtgtcagattgttgagacggtcaacttgagcatcagaatgattgacataaggctgagtcgttggcgttggaggcgatggtggattggtggaacctgaacctggaacctctgagatattcccaccactaacagaagaattgacatgcaacaggtcacgctgatgttgtctaaaccgtacataagtattatccgacggcatcttgcacaaaaaacaaatcaagagttagatttgggaaaaagaagtaagattggagaagaagaagaagttagatttgagagaagaacttagatcggagaaacagaggttacctttgaggcaaaatagatcgagtcagagaagaagagacgcgacggtgattgcatactgatcggagaagaagagaggcggcaatgagtataacagattagagaagaagaagagatgcgctgacggaatcagatcggagaagaagagatccggcgccgaagagatcagagaagaaaaagagaatcgaagaagaattttagggttagggtttgatgcggctggtttgagctttgctcaaactaggtcttcgagtatatatagatatatatttcctcgcaaaaccctcgcatagattgctttgaaattgcgaggaagatttttaaaccaattaaaatgcaccacatactgcgagggaattgcgagatcttctagcaagtccctcgcaacctttgattttaaataatttaggatttagggtaatatttgcgagggaagtgcgagtgcgtctagcaattccctcgcaatccttaaaccaattaactccaccattttgattcagtgtttgactcagatctgatttagattctcttatttcgaataagactctcagcaaataaaaacatgactaaatattttaaataatttaaggtttagggtaaatatttgcgagggaagtgctacgacagccttgcaaatccctcgcagagacctcgcattgttgaatcaatttgaaaaaatacaagaaaactttacttaaaatcattcggattcgttattctgaatcattaggaagttaaatatctacattagaatctaatttcatctcaaaaacttcaaatgtgcattttcgccaaagatatcaatgatgaacttatgtgttttcaataatttgaatcataagtgtttaacattttcaaaatgaaatgttaatattgaaacatatacaatatgtttttgtgcatcaccatataatcaacttgtatgattatacagtcatttagatttacatttataaatgaaaatcaaagatcccatatcacttctatgtattttagggtttagggtaaagatttgcgagatttttgcgggtggtttgcgagggatgatatagttcattgcaaagtactcgtactttcctcgcacatttgcgaggaagcagtttctcgcaagatttgcgagggatttgcaacgtgcgtccgtggtctagcaaaatacctgcaattccctcacaaatttgttcctcgcaaaacgactgttttcttgtagtgttaaatgcctaggctcatgtatgatagttcaaataacaagtacctatggcgggcatacctattatctaatatcaagttctaggtgatcaatcttaaactagcaataagaataatcaagatgaagaactctaagaataatccaaaggggttttcgatctactaatccatctaaatccctattgagacttcctaaacccaacaaggtgataacctagacacgataatagaaacacaaatcataatctgaatagtttgcattgatgaattaagaataatagtaaaagagatcagaatcctctctaaaagaattggattcttctctcaaaaatgtgtaacaaaaactaaaacaaaacttaggtctaacaatgaccaaacaattaggtatattcgtgactaaaaacgtgcagggactactttgcaaataagcaagacttcagggcttctcaaatacttggtcgaaaacgaaaattccttaggcagcaataagagtgtcgatcgacacaggtgtggtgtcgatcgacaccagcttctgaaaaacgtcgttcaagatcttcgttgctgaaaagcttccaaaattccttattgtgctccatagttcccagatgtgtaagtgtacctaaaatgactcaaaacatacgaaaaaggctacaaagactctaaaaaccattctaaaactatgttagaaatcagtaaaaaccaggacatatcatgttacatgatgtgggcagtctcgttggtactccttgaaacgaacccaagcagccttaaaagcttcagttggaccctgtgtgatggtagacaacttgtttctcaactcctcatacttagcatcatcgtaaaaattgttcaaaaaggctatcttgatgcttctccaagtcttgagggaacctgctttaagttatttcagccaagaagctgcttccccaacaagtgaataaggaaaaagcttgcacagtaggtagtcctctgagactccattagccttgatgctcagaacaaggtcctcaaagcgctctatatggtccattgcctgctcatgagataagccatggaaaggatgctggccaactaaagcaaagtagccaggcttcagctcatagtcgttcctctggaagggtgtgggtacgatcgctgatcgattagcaaagaacaggtcaggccagttgaaatccccaagagtacgacgtggtttcgcagctgaaggaatagctgcaggaatctggtgttggtgttgatcgacacctatgttgtttcgttcgacatcaatcgcatcgtcattcttctcccgagggtgtcgatcgacaacgagccctactgcatctctggcagctaattgcgcgttgaggcgcgcctaatttgcatcgacgtcctcaagtaggatgattccatgataatccaatctttgaccagcctcattgtaggcttgcccatcctcatcagctcctatgactctttcagccattgctaatctctaagttttcccaagtccaaaatagacaagttgataagctccttctattgtgtgctccttgtttgcctagccatacacctgaaacacagaaaagaagaaaacaagaaaagcgtgagtaacaaaataaaagtaaaagctagacaaaatctctaaactaaactcaatgaatgattcccaagaacttcggcaacgacgctaaatttgatatggttcaaattacctagaactactctaaaataagagatcaattgcagtatttaaggatcgaattcacagagttcttttgttcaaacagtgagttgaatgtcgagattaagctagcaggtgatgattaaaataataagtacacaaagtaagaaaacagtagcatgattgtgttgtaaacgattaaataaattgctaggaacaagatattctcaggaaactattggttagtagatctaatgaaagctaggttgttatcgaaccatttttaaactcaaactctaattatggaataacaggtggcgttctgcaaaactccctatatctatagctaagaataactggagaagccgagaaattatcaacctaaatatgtgatagtaggatttttactcaattaatcctaaaacactatcctgtcgttgtagtattttaggatgtcaatccaatccggtgtgatgcaaacagatgagatatgatcagaaagctctaagtcaagccaagcagagagttggttggttctaacagtcctagtatgcaataacagaaatgaaatgaaactaaaagcagaaatggcaatagtaggcaagtgaatgacaaagcataaatgataacaggaaatcaaatggataaacgattcctaaggatagggtaatcgaatagcgtggtctacttaatctattcaggcggttgacaaaacttcacagaagctatccctagacaacaaggtcaacaacagattaatccacttccgtgatagaaatcctcaagcaaagctagacactgacctaaatccctttagcgatctctaactaagcaggcactatcgaatcaacatgttaaagttaataccctctcttcagccaatcccttggggtagagtcagatatctctggaattaataggatccaacgcccattaaacgccttctgagcgctggacgtctagactcatactccacattagccagtgaaacaagcaataagcgcaactaatccagaagggattctagtattctaaactcaaccacctaaaacgaccaagtaaaccacaactattctatcccatcctcagaaatacatttcactactcaaacataatcaaagacaatagcaaagcaacaattgaaaacatgataacagaaatgacgaaagacttaaacaaaaactgaataacaaatatttgaaagtgaaaatacaaagtcgcaagagaaaaactccggctatcaaagttgcgaaaatgtaaaagcgagataattatggataatagcggatgccctagggaaaaccctaagaggcaatttatataagcgagaaataaaacaaataaggaaactaaatatatagcgaatcttcacgtcatgatcttgcgaccgaatgtgtcattggcatctcacgggctgaaatgagcttcctagtgatcgagtgataggcatgggacttcctcccaagtgagcttgttttaaatctctagcttgactcctcacactcattaggctcaaggagggtaatagagtagaattgacgtctcctctccttccttagtagatacaacatcaaattcagcatgctctcgtgacaagtctgtaagtgagtactcaatggccctttcttggtaagctcctttttcatcatcttgatagtcgtcttttctggactgttttgatgtgaattcacatccttcttttctaaccataggaataacttcatcatttgggacgtccttgatgtcgagtggagcttggttggctttcccatcgagctctttgacttgatccttcaactctttcacattgtgtgttagctctattatagctttgtcgtgccattttgacctctccttgagttctaaccaatcatttgatgccctcacgcttgactctagctgtttggttgagcattctagtcgagtatcagttgagccttcctcgttcaatgtaacatcctttgtttctgacgcaatgtcacctttaaatatctctgatcctggtacttcgttgtgtgagtctaatgacatctcatagctcaaggtctcactggagagaaatccagtttcactacttttggttaaagtagtttgaaggtgatctctgtcaacaatctcctctagcagttcattacctagctgatccatttcctcaactaagaaggtttgtccttctattgttggcttcttcatagcgtccctgatgtcaaacttcattttgacatcctctcccagattaagattaatttttccctacttaacatctattactgctccaactgaagccaagaaaggtcttcctaagatcagaggatccttagatttttcatccatctcaagcacaacaaaatcagtaggcacctctactccattaatcattacttacacgtcctctaaaaggccaaaaggtctctttgaagtcctatcagcaagaatcaaggttaggtcacaaggcttgtattgaacgaatcccagcttctttacaacagagagtggcattaagctgactgaggctcctagatcacatagacaattgttgaaagtcaattgcctaatggagcatggtagagtaaaagatcgtggatcttccaacttttcttgaacaatcttcttctgagtgattgcactgcactcatgacttaacaccaccattccttggacttctttgatcctttctgtaatcaagtctttcacgtacttgtgctcgtcaggtattagcgcgagacagtccactaaaggcatatcctttatgtgtttttccaggagggctctgtattttgcaaccagaactttcttgaaacgaccagggaatggaagcagaggtttgtaaggcagtggcacgaagactgtgtctttggtctttgtagcttccagtttttcaacaaagggagtagctaggggagcttgtggtcgagtgggttgactggtgagtatgggctcttcgattaggttgtcagccaacacatcatcttgataaaaatcctccccctctagaattacactttcctcagtgtttgatgtagggacatatcgagttggcagctcgcgatcatgtgtgatagtgatggcatgggcagtggcatactcctttggattctggattgctttccttggaagctggcatgggttgttgttaacagatggtgaagcgaggatgccttccacatatctcatcctagtgctcattgattcgaacttgctgttaagtttgatgccttatcggtcgactttgttgtttacttcagacagcttcttagcgatttccattgctcctgtggcttgtccttgaatgagctggtagagcacagtcattatgtctgaattctgaggcgcaggtgcttgttgttgatgtggtgtgaaaccaggtggtggttgttgttgttgatatcctccttgaaactgctgctttggaacgaacccttggctttggttgtaaggaacaaacggtttggattggttctgctgctgctgctgagtctagacttggtcctgagggttggcgacattggtgcttctgtatgacagatttgggttgagtctatagttattgtaccccttgttgtagccaccttgattatgaatatatctgatttcagcacactgatcattctccccctcttgtacttggaatggttcatctttagagatgaagtgaacatgtttctgttgcatttggatgattttgtcaagtttgtcattgagaggtttcatctctctatggtgcttgtcatcagtgtcagaactggtgtagatgcttctgtcatagtcttcattgtaattgccatccgattgagcaaagttttcaactagctcccatccttcttcaacatccttcttcagaaaatttccatttgaagcggtgtcaaggagcatacgtatcttaggcaggacgcctctgtaaagtgtgttgagaagagaagcttgggtaaatccgtgatgagggcatttggtttgataacccttaaagcgctcccaagcttcatagaagctttcattttgcttctgagtgaatccggatatctcattccggagtcttgcagttctagagttggagaagaattttgccaagaaggcctttttgcactcatcccaggtcgtgattgaattctgggctagcgtcttttcccacagatgggcttcatctccaagtgaaaaaggaaacaagcgaagcttgaaaccatcttcactaactccatggattttagtaaggccacagagcctttcgaactcgtcaagatgatctagcggatcctccattggcaggccatgaaacttgttcccctgaaccattgcaatgagaccgcttttgatctcaaagttgttgttctgtactggaggtgggacaattccatgacgctggttgtggttgtgagggaaatcaccagcaccaatgttggtaggttgctgttgctcatctacaacgttagccattgtgtctgtgtctgtctgttctctcagttggcaagcaatacggtcgatgttatcgttgaataggaggttctgatttccttgtgaccgtgtatgcatgcaacagatggcagcagggctataatcgacgaatcagagatgcgtttggaaagcaggttacaaggtacctgaaacacaaagacagaaaaggcacaatgttagtaacttcagtaacaaaaacgaacttgatcttaacgtttctaatgatctcaaatatagcaaacaaacaccgaactggaaacggcgccaaattgatactaggatttttactcaattaatcctaaaacactatcctgtcgttgtagtattttaggatgtcaatccaatccggtgtgatgcaaacatatgagatatgatcagaaagctctaagtcaagccaagcagagagttggttggttctaacagtcctagtatgcaataacagaaatgaaatgaaactaaaagcagaaatgacaatagcaggcaagtgaatgacaaagcagaaatgataacaggcaatcaaatggataaacgattcctaaggatggggtaatcgtatagcgtggtctacttgatctattcaggcggttgacaaaacttcacagaagctatccctagacaacaagttcaacaacagattaattcactcccgtgatagaaatcctcaagcaaagctagacactgacctaaatctctttagcgatctctaactaagcaggcattatcgaatcaacatgttaaagttaataccctctcttcagccaatcccttggggtagagtcagatatctctagaattaataggatccaacgcccattaaacgccttctgagcgctggacgtctggactcatactccagattagccagtgaaacaagcaataagcgcaactaatctagaagggattctagtattctaaactcaaccacctaaaacgaccaagtaaaccacaactattctatcccatcctcagaaatacatttcactactcaaacataatcaaagacaatagcaaagcaacaattgaaaacatgataacagaaatgacgaaagacttaaacaaaaactgaattacaaatacttgaaagtgaaaatacaaagtcgcaagagaaaaactccggctatcaaagttgcgaaaatgtaaaagcgagataattatggataatagcggatgccctagggaaaaccctaagaggcaatttatataagcgagaaatgaaacaaataaggaaactaaatatatagcgaatcttcacgtcatgatcctgcgaccgaatgtgtcattggcatctcacgagctgaaatgagcttcctagtgatcgagtgataggcatgggacttcctcccaagtgagcttgttttaagtctctagcttgactcctcacactcattaggctcaaggagggtaatagagtagaattgacgtctcctctccttccttagtagatacaacatcaaattcagcatgctctcgtgacaagtctgtaagtgagtactcaatggccctttcttggtaagctcctttttcatcatcttgatagtcatcttttctggactgttttgatgtgaattcacatccttcttttctaaccataggaataacttcatcatttgggacgtccttgatgtcgagtggagcttggttggctttcccatcgagctctttgacttgatccttcaactctttcacattgtgtgttagctctattatagctttgtcgtgccattttgacctctccttgagttctaaccaatcatttgatgccctcacgcttgactctagctgtttggttgagcattctagtcgagtatcagttgagccttcctcgttcaatgtaacatcctctgtttctgacgcaatgtcacctttaaatatctctgatcctggtacttcgttgtgtgagtctaatgacatctcatagctcaaggtctcactggagagaaatccagtttcactacttttggttaaagtagtttgaaggtgatctctgtcaacaatctcctctagcagttcattacctagctgatccatttcctcaactaagaaggtttgtccttctattgttggcttcttcatagcgtccctgatgtcaaacttcattttgacatcctctcccagattaagattaatttttccctacttaacatctattactgctccaactgaagccaagaaaggtcttcctaagatcagaggatcctaagatttttcatccatctcaagcacaacaaaatcagtaggcacctctactccattaatcattacttacacgtcctctaaaaggccaaaaggtctctttgaagtcctatcagcaagaatcaaggttaggtcacaaggcttgtattgaacgaatcccagcttctttacaacagagagtggcattaagctgactgaggctcctagatcacatagacaattgttgaaagtcaattgcctaatggagcatggtagagtaaaagatcgtggatcttccaacttttcttgaacaatcttcttctgagtgattgcactgcactcatgacttaacaccaccattccttggacttctttgatcctttctgtaatcaagtctttcacgtacttgtgctcgtcaggtattagcgcgagacagtccactaaaggcatatcctttatgtgtttttccaggagggctctgtattttgcaaccagaactttcttgaaacgaccagggaatggaagcagaggtttgtaaggcagtggcacgaagactgtgtctttggtctttgtagcttccagtttttcaacaaagggagtagctaggggagcttgtggtcgagtgggttgactggtgagtatgggctcttcgattaggttgtcagccaacacatcatcttgataaaaatcctccccctctagaattacactttcctcagtgtttgatgtagggacatatcgagttggcagctcgcgatcatgtgtgatagtgatggcatgggcagtggcatactcctttggattctggattgctttccttggaagctggcatgggttgttgttaacagatggtgaagcgaggatgccttccacatatctcatcctagtgctcattgattcgaacttgctgttaagtttgatgccttatcggtcgactttgttgtttacttcagacagcttcttagcgatttccattgctcctgtggcttgtccttgaatgagctgctagagcacagtcattatgtctgaattc

SEQ ID NO: 1470 - DNA, 96743 bp, Arabidopsis thaliana
gaattcctcatttatcacagaagccttggaagcgggttgatataaactgtgagccgttatctgtaacgatctcataaggtatcctgtggcgacataggatatgtttccacacgaagttctcgacttgagcgtcctttatgctagtgtaagattcggcctctatccacttagagaaataattggtcaagacgagaactaattttttctgcttaaagggatgcatatgtccaattatatccattgaccatcgcataaatggatacggcaaggcgattgatgacaagaactcggctggctgatggattattggcgcgtgcctttgacatttttcgcatcgcattgaaaaaattttgcagtctttgatcattgtcggccagaagaatccgtggcgttttattttaatggctaaagttcttcccccaaaatgatttctgcacgagccaccgtgaatttctttcatgatcttgcaaaccgcttctccttccacgcatgtcattaagggtccggataatcgccacttgtaaagtttttcatctattagaatgaaacgtgcagcctgagctttgagtttccgagcttcccatttgtccgagggcaattttccttcggctatatagcctttgatgggctttatccactctgaactgcactcgtcttggttgtcgcctggagcgtcattgtgattcgtgccgacttgtatggggaggacatgttcttcttcgccgacctcaatacttggcttctcaatacgttcgtctggtccccagaagttttgcctggagtaggtgttgacatcgtgtcacacgagctcaacattgacccgacgttcaaacttattaagcagaaaagaagaaaattgggtcgggagcgagcaaaagccgtgaaagccgaagtagaaaaattactgagaattggctccatcaccgaggcaaaatatcctgattggatcgcgaacccggtcgtagtaaaaaagaaaaacggcaaatggagagtctgcgtagatttcaccgacgttaacaaagcctgcccgaaagacagcttccccttcccgcacatcgatcgtctcgtagaatcaacttctggaaacaagctactgtcattcatggacgctttcggtggttacaaccagaacatgatgaaccccgaagatcaagaaaaaaccgctttctacacggaacaaggcatcttttgttactgagtgatgccattcggacttaagaacgctggggcaacttatcaacacttcgtcaacaaaatcttcgcattacagatcgggaagacaatggaagtttacatcgacgacatgttagtaaaatccatggcagagaaagatcacatatcccacttacgcgaatgtttccaacagcttaacctctacaacgtcaagctcaatccagcaaagtgccgcttcagagtaagatccggagagttcctcgggtaactagtcacgcaccgcggcatcgaggcaaatccaaagcaaatcgatgcattgttgggaatggcgtcacctcagaacaagcgggaagtgcagcgcctaaccggaagagttgcggcccttaaccgtttcatctcccgctcaaccgacaaatgcttggccttttacgatgtgcttccgggaaataagaagtttgaatggacgacccggtgcgaagatgcttttcaggagctcaagaagtatctggcaacaccacccatcctcgcaaaacccgtcggagaaccactgtatttgtatgttgccgtatcatatattgcagttagcggagtgttaatccgagaagacagaggtgagcaaaaaccaatcttttacgtcacgcagactttcaccggcgcggaatctcgctacccgcaaatggaaaaactcgctttagcagtcctaatgtcggcttggaagctgcgaccctactttcaatcccatcccagtattttatctttgttagaagatacaaagacaaagactcatacggactgtgactacaccatcaaagctttgagaagcaagaagaagtttgcttagtttctaggagtcaaatatgactagatgtcatgtgtatgattgagtataagaacttaaactgcaactggatcttaaaagcctaagtagtgtttccttgttaaaagatgcaaagccaaagactcatacagatttcagctacaccatcaaagttttgtttgagatgcaagaagaaacttggttagtgttttggagttaaatatgacttgatgtcatgggtatcattgggtataagaaatagaaccgcaacccgatcttaaaagcccaagtattgtatccttgttagaagatacaaagacaaagactcatatggtttacggctacaccatcaaagatttgagaagcaagaagaagcttggttagtgttttggagtcaaatatgacttgatgtcatgtgtatgattgagtataagaacctaaaccgcaaccacatcttaaaagcctaagtagtgtttccttgttagaagattgataacactgtattttactcattttaggtgtgtatttatcatcatttagcttcgtatttgctcattgtatcatatcattttgcactattttagcttattttgcacacctaggcatttaggatcatctcgcatacgcattgcatgttttggtgtgttttcagggtcagaaggagctcaaaagggctctactcgaccctatactctatccaacaaggagggaagcagcagagcattctactcaatccattcactcgatccaagcagccacagaggaggcagcaattcactcgaccctcttactcgatcaagacagccttagaagaagaagcagattgatctactcgacccttctactcgatcctctactcgacccatttactcgaccaagggtgaccaactctacaagacttgttgatctatcaaagcgtctttggatcctcctcattccccactcaaccagacatctgagcatacggataggagaggaagaagcatctactcgatcaattgatcactcggagcatagacacaaaggagcagactttgcagcaccctcattactcgatccccaagatcgagcattcgcccaaaccgcctcaagtctcttgtcctctagtgaatctagggtttcaacattttactataaatagatcactttgggatttgtccaaaggattcttttatcctttagtttttctttgtgtttatgaatcttcaaaacttaatcactcttaatctatttttttttgcatttagttgtttaagtaaagttgtttagcttgtttagatctacattttaatatgatttcagtaatttctgggtttgtgtacttgagaatgttgcttgagtagtgattatggttcttgaggatggattagatgatggtaatctctaggttagtcaggtggttaagattaggttagaacccttctggattcgcttggccactatgcgattttcggtggctaatgttgagattcgatcatagacgtctagcgtccaaaagacgttcaaatggatgtctgatctacgaattccagagatttgtagactcgactatgacatttgcttgtctgcttattggctttggtagattgttacttaaaccctgctcttctatgtttcatcaacgacagttgagattagaaagtggtagagttatggggatctttgtcacgacggtggattgacccagtttttgaatctatcgtcaagagtatctacctttcacctgttagccaccagatgaaccctagagttgcccatatcaaagaatccatccttagaacttctattagatttatttgtataccctgttgattgcactttcatttacctgttatttgtatcccctgttgattgcattttagttacttaaatttgtcacctgttggttctactcgacccaatgatcgagtagggctcttaagttctcatttttacttgtttgaatcctgacctaggattgttactagaaacccaccatcattataatttggcttgacttagttgcttctgtacacgtcttgattgctagcaataacgatggactggattgacaccctctatagttgcatcgacatgttagtgtttaaggggaattgaaatgaacctcacattcagcacataagtaggcttaaaaaaacttacttatcaatttggcgccgttgccaattcattgttgcattgttacattcaagatattagaaaaatttaagatcaaattcttttacatttatcaagttactaactcatcttttcgtctgcttgtttttgtggtataggtactaatctttgtgcatgcaaactcgatccaaaggttctgcacacctactaccattcagagacggaatagatagaatagctcgtgagttacaagaaaccaaagcaaaggtaacctgtgatcagcaaagaccagctgctatggatcaacagaacataccagttgatgttcaagacccacctaatgttgatcaaccaagaaacattggtgctggtgatgccccaaggaatcatcaccaaagacaagggatagtgcctccaccagttcagaacaacaactttgagatcaagagtggtctcatctccatgatccaaggaaacaagtttcatggtttacctatggaagatcccctggaccatcttgacagctttgataggctctgtggccttaccaagatcaatggtgtcactgaagatatgtttaagctcagactatttcccttctctttgggaaacaaggcacaccactgggagaagactctgcccccagactccatcaactcatgggacgattataagaaagcttttcttgtcaagttctactctaacgctcgcaccgctagattgaggaacgagatcccaggcttcacacagaaaaacaatgaaactttctatgaagcttgggaaaggtttcaagaaggcttcattattgagcacactctaccaaggagctttaccaaatatcagaatgctactcgacaccgcgtccaatggaaacttcctgaactaggatgtagaagaaggctaggagttagtcgaaaatctagcacaatctaatggatgatacaatgaagactatgatcgctcagtgagaggaactggaggaacagaggacaaatagagcaaagatatcaaggctctgaatgaaaagctagacaagttgttgctggctcaggagaagcatatacactacatcattgatgaagagcacttccaaatgcaagaaggggggaaagatcaaactgaagagttgtcctacatccagaaccaaggagggttcaacaagggctacaacaactaaatcctaacccaaacctctcctacagaagcactaatgtagctaacccccataatccgcctgagccttttgtttagtacaaccaaggttatgtccctaaacaacaatttaatggaggctaccaacaacagaatccaccaccagggttcacacaaccaccacaacaagtcccagcagctcaagatccagaaattaagcaactcattcaataaatcattcaaggacaagctactggagctatggcttttgacaagaatgaagctactagggatcatggaatacaagttctggaacttagctttactcttagctgatggttctgttgcacatcctcacggtctaatagaaaatctgcctctcaagattggaaatgttgagatacctacatattttgtggtattggacgtagatgaagaagacaaggatctcctgatcctatgcagaccattcttagcttcaggtggagcagtcataaatgtcaggaatgaaaaaattaatctgaaccttgaaaaaggtatcaagatgaagtttgacatcagagaagcttcagggaaatcaacaacaggaggtcagagttttgggattcagaatatggatgttgatgaagaaacagaagctggaaccccaccaaaagtcaactatacttctcaacttagcaagctgaagagaacttttgaccacaagaagagaacaatagaagggttagctcagactgaagatcctacaaaagatgactggtatgagatgagaaaaaaacaaaaatggcaaagtagagtcatagagggattatcttcaagggtgatgaagctgaaagatcaactatggatgtttgaaaaaagagttaataagttttcaaatggtattgacccagagaagatggaaattgcagtagctatcaaggaggacgaagatttcacaacagaatggtttgcatcagaagatcagaaaggagttcacttagaggaaagaagcctagagagcaagttgttgagtgaggaggaaactcctattctgacttattctccgagagtgtctaaacagcccaccaacccctttgctaaagaagaacacttgattcatgattttgttgctgaagaactcctggagctctaggttagatataaaggtcaagaggatacaattggaaagttaactcataagatggaagagttaaacagcaccattctggaacttcaagaaatggtcaaggactaccccagctttgaaattgaggattggtcaaaggagcctggttcagaacaagaagactactctgctgatcagaaaaagcttattttgaagaaatatcaaatgagtattcatcctaccatatgtcaagagaggatgcagagtatgattcaagcattgaaagttcaacaactaaagatgaggacttctctgttcctctcttcaacctttttttgactaagctttgtaagagtcaagcttagtgacttaaaacaagctcacttggaaggaagtctcatgtctatccatgtatataaatttctatttttatttttatttttgatgtttttgtttaagtgcttcaggtttgttttagtgaccttgaggaagtcaaaggtggagtaaattcaaaccaagtcaagaaagatctcaaacgttgatcgagtagaatgaggaggagtgttttgaggcgttgatttgaatgaccaaatgagagaatcatcaccaccgtttgatcgagtgatttcttgcattctggtccgtttgatcgagtgcttaaagatgaagcatttctcaccgtccgatcgagtgaaaaaaacaaagaaaccctcttcgtagacaccgacgcctcgtgacccgcctccattgaaacgttgttgtccctttgtcttcttgtcccccccataattactttggtccccccattgcaattcccgaactcaacaacctcatctctctacctcccataccaaagcattttcgaatccttataattctctctatttatctccttcacttccctttcttatcaaaaacttttcgcgattcatttgtatcctccattgttcaatctcctaacctactgaattttggttttgagtttctcccacttttgttctcgaagacaagcaggcgctcgcttttgtcaaggattcgaaacaaagctctctccccatcgaagaggtacccaacaccttcttcgcatgcaccagcttgaggacttttagaaccatcacccatgggtcgagcaggagagaacaagcaagtttcaagatcgaccacagtgaaacaagccaacaggaggaagtgatgcaaaaagaagaaactttcagctctcccgctggaaatactcgatcccgaaggtcgagtaagtcctctgcaagggaattctcgaggaacaaggcagacatcaccctcgaggaaagaagcccgtggggaggaggctggaactggtagatgaagactccaaaaagaaatggcttcaccagaggaagatgatcaaactgagaaaggaggtggtgatgatttggaatcagagaagtgtgcaactcgaaacgagtactacaagctgctgaagcgcaatgagtttttaggactttgataccctcatcccgagaccatggagagactcggcatctatgatgatatagactatatgtttaagtagttcagcctgaatattcacatgtttcggccaatggaggggtatgaggaagagaccatccagtttctttcatccgtggaattcttcttatatagagagtcagaggacgatgaaatcaggccaggcggaattttgggatacttggagttctgtgaggatgacgtagagtatcggcttccaatcgagcatctcgagctgatgtatggatttccaagcagaaaagacacgagtcatcgttttgacaagaaagagctttagtcattattggccacgcttgggtctaaacatggggtttcatcctctaggaccaagagcaacgagataaggagtctggtggttagatactttcataggtctttagccagtgcactatttgcaagagagaggaatggttgtgggaggagttgtgaccccaattttgagagcatgcaatgtacctctacattcaaagccgattcctccgagatggattgatatgcaacaccttatcaattccaagagtttttggtcgcagcagaagaatggcctatataagtataggttcgatcaccccatagcaggacaatctatttttctcctcccaaatcccgcttccacttcgatcagagatggtggcaacattgagttttgcccaccagtggagaacctctatacttcaggtgatgaagatgtagcgatggaaggagtgaatgatgatgagaccccaattcatcattcagataatgaggcagaacctatggacgtgtcttacgcaacacaatagttttactttgaggagtactccgcaccgaggcaaagtaaatactcaaaggaaattactaagcgccttggtttcctccaaagctggtgtaagttccacgacaaggctctcgcggcactcaacaagaagtttaataatctccaactcaagatcatctgctcttcatcaactacggcaatgccacagaacatgccttttgggagaagcggatccactcgtcacgaacctatgcatttcggtccgccttcaccaccaagatagtcttcatatgagccgagggaacaccatgctgcaccttcaccaccaaggcaatcatcctcgaacctagagaaaaggaaaagaggagcaacttgaaaacgcaaagaagaacaaggaaatcagatgctagagcaagccactctactgcaccacttgaggagccactcgatcaataacccgagcaaagggttgaacatccagctaatccaagttcagcacaacccgttccttggagttacacaaaggagagtatggatgatttcgtctccccctacttcacctgacaactgaggtaacaccacctcaaccattgtatataccatagcatctttttattttcttttgtgtgttttgtgttttggtcttgaattctctttcagatttttattacacaagggactgtgtaatttaagtttgggggagggttcaagacatgtttaacattgtgttctcttttcttatttcaatttttgcatcatctaaggcatagaaaaaatcattaaaaaattgaaaaaatttcagaaaataatttcacaaaaacagagtgtcatgtagattgcatatcattttaggattgtatatagagtgcttgcatttaggattgctcatttgcataggggataatgatgatttcaaaccgttaagcatgttttgattcaatgaagtaagttcaataccgaggttgttagttctctgttgcataaccgattgtatctctgaagtaagattgcaccctgctttgatttacaacttgactatactgctttgattcaaaactcgcttatctgatgccatcccctatttattagaacctgaactgaatatgcaattatcatgtctttgcattttttgtgaactcatggctaccatatatacatacttggattatcttattcacttcaccaccatctgttaatctaagtagctgactctcatttttagatcagtttcccatacccttagcctagccttatttcaagccaaagatcatttgtgtgtgattgtgaggtctttttcgattgagcttggtataacgtgttaggtatgagccgacaagagcagtctttcatgtagacctagcccacgcgttttgggttagctacgactaggtggagacttgtatttgggattaggattgtgtatggattgaatgcgaatgagaatgagaatgaaaagaaaaaaaaaaaaaaaaaagagagtaagagtttagagttcttaagggggattcaaaaattgttagtctagtaaagggtttggagtccaattgatcactcggagcatagacacaaaggcttagactttgcagcaccctcattactcgatcctcaagtttgagcattcgcccaaatcgcctcaagtctcttgtcctctagtgaatctagggtttcaacattttactaagtgataagagtgtaagtttattgtgtaagtgataagagtgtaagtttattgtgtaagtgtctggtttagttgtctaagtgtctggtttagttgtgtaagtgtgttagtgtattgtgtaatgtgtaatgttaagtgtgtgctttagttgtgtaagtgataagagtgtaagtttattgtgatgtgtctgcttagtaacaagagttcgagtgtattgtgtaatgttaggtgttaaacttagttgtgtaagttgtgtgagtctattttgatctctagtatgcgtctggttatgatgtgtgagccaattatgatctctggttttaatgtgttagtgcattgtgatctctggtttagaagtgtgagtgtcttatgcatttgatccgtgtattcttgtcatgtctttgcaggtttactcgtgacacatcttccaggctggttcaaaagattactacagtaaggacaaacaaatttgatggtatcttctatagctggtcatgtgttccacgggatcgacgagaaagatacttcctcgagtttgcggtatagtttttttctcttgcattcacttaaatgtttagttgttaattatcttcactaacatcatgtctttgttatttgtagaaaacacaccattgggattctttgattacaggaacagttcaatactattttgaagatatatgtcaaagacggatgaaagatatgattagcactgtgaggactagtcgagagtgtcctaaatggatcatcgattcccatatctgggaaacgatgtgtgcatattgggatactgaagaagcaattgcaaagagtctgacatattccaaggctcgcatgtctgaccgtaatgtgctcggtcctcacacccatttatcaagtccaacgtcctatcaacaaatccaatcagcaatggtaaataacttcttgttctctctgttatttgttttacatagtccattgcaagtttagatgttgttttagtccttgttcatttttaacattgccggaagaggaattaggaaggacaatgggtattggtgaggtctttgtcaagacgcataccaaaccagatggcacttatgtcgataagaaggctgagaagattgcaaagaactatgagcagaaattgcaggagaaagtttctgtaatggaggcagagacttcaaatgtttcagacggggaatcatgacctcgggagctcacagcagatgactgtactttcatcttcctacaggtaaactaacattttcataattatggtctgcatattctcatggtctttagtaattgtttgtctctttcttttcagtccacagagaaagataatcgaggaaattattatggagtgggcagtcttaaggagcatcttccggatctagtcacaggaaaacgcaaacacttaggagaatctttttctttcgtggcattgcaagtgcaactcaaggaagctcaacaaaaaattgaagagcaagctgctcataatgcaaaacgtgaggaagagcaaaccaaggctgtagctgagcagaaggacaagttggcacacttgtccttggttgagaagtatttgcgccaaactgatccagcctttctccacttcatcgagtccattcacctgaatcaactacagagcctatctcatctccaactacttcttaagttacttctccctctttaaaactagcatgaacttgtagtttagtgtttgaatcttgtattttgtacttctccctcttcatctccgaatgtagtgtgtaatgtttagtgtttgaatcttgtattttggttacaatcttaatgaatttggtattttggttagaatcatgagtttggttttgaaatttagataagaatagttgtgaatgcattacatgattaagcaatgtaaatcagaaatagaaatgacatttttttcttttgtctgaaaccgtagtcgttactcagtcacatattagtcggtaattagtcgcagaatacccctacaataatcgaaagttcatacagtttaatcgtaactttgtcgtaacatagtcgtaacatataaggactagtttacgactaacagtacgacttcgtgcgttagtcgtaacttagtcgtaaattggcgactaaaattacgactattgcgttcagcgactgtggatttgcgacaacattgattagtcgtaacacagtcgtaatatatatataattgattgtgtcaaaatacttttgaaaagtcgaacatgatattcacactccatcaatttcattaaaacaccacgacaattaacaacataactattaaggattagagtataagagcttcaatcttggaatcatatatatgaaagttggccaactctctccatatgagtgacacatcatcataccagtgagtgccacatgttattctaaattaatattattaaaatataacaaaatttagtgataaaaattttaaagtttcacattgcattaaatcatccattaatctcactcttaacaaaatatctttatttaaaagaaaaaatacaaaaaatcatgttaatgtatcaaacactactttcattttacttttcttatttttgctatttgtataataatcattacttgataatgactagaaatttttgtatattacaaattagttgtgtgctacttaaccgttttaagtttagtaattttaacttagtctttttttttattacattttttaacttagctgtttgatatggttttttgtgtgtttatgataaattggtaacattaataatgacatgcatattttttatgtagtgatcttttgagacgttaggtataccaaaaagttcaatagacgacgctttctctaatatagatatatgcaaatgcaaagagagaaacaaagtgttgactcaaaagactatttaatttatgcttttttttttctctttcatgtgaaaacttttaaagcaaatgagtagtttatatatttgttattcaaattatgttaatccaatatttagctatgagcctatcatgatgtgattggaatactagattaggagagaatacatggaacaaaaaattgtttgcttagaatcaagttaggcaactttcaagaaaaattctttctaatgcccttttcatgatgcccctttttaactctacccttttgttttatcaatttttatttctaccctctttaaattttaaatgaccattttacccttatttggaaattgttttaggttaacaaaatgaaatattaatatttttcgcctaaaatattccaaaataaatttcccgccaaaatttttcaaaagaacaatttcccgccaaaattttgttttcaaaaatatttttcccgccaatttttttttttggctggaaataaatttacaagggattttaaaaggtttttaaaagatttacaagagattttaaaagggttttaaaagatttacaagggattttaaagggatgcaaaagatttacaaaggtcttttaaagatttttaaagggtttaaaattgttttaaaaggattttaaaatatttacaagagattttaaaagggttttacaatatttacaagaaaatttaaagggctttaaaagatttataaagagtttttaaagattgtttaagggtttaaaagtgttttgaaatatttacaagggattttaaaaccttttaaaattacttgtaaattttttaaaacccttttaaaatcccttgtaaatcttttaaaactctttaaaatctcttgtaaatttttttaaacctttttaaaatatcttgtcaatcttttaaaccccttttaaaatctatttcccgccaaaaaatatttacaaggatttttaaaatcatttttttggttgagaaaaaatttggcggaaatttgttttggcgggaatttttttttttttgcggaaaaaaagtttatcgggaatttttttttggcgggaaaaataaattttggcgcacaaaaattggcgggaaaatttcagtttccaattacatgttcctattagatgagggtaatttggtcattttgttcaagggaaggggtatttttaaaaatggacaacataaaaggatattgttgcaaaagggtaataaaaaagggtagttttgtaaatctcccaactttcaaaccaaataagtagcataattgcataacattgtatcatattgttgatgtaagtattttatgatagttaaaaaagtttaaaaacttgggtatatagataagaagatttatacatgaaaaaaatataattgatatttgaatcaaaagtgaatctaactatacaagtataattacctaaaataaaatataactttattaactacataataacatacacaaaaataacataaattagcaattaaaatagttaaacataattatttttaaataaatttcaaacaacaacccacgctacgcgtgggtactcacctagttatattgaaatctctaaagaaaacatcacatgtttaagagtagaaaaaagtattgaaaaacaattttaccttgctttttgaaatagaagcattagagacctactaatattatacatcttgagaagaagtatttacgaaacggtgtatcagatgagaggtaggtttcttatagccattgacaaagcggattgagaaccaaaacctgaattgcaacgagagatcgagatcaatggctaagcagtgctagaagaaagtacatcgcatgtcgattacaatccgctatatatgagatcagatttatgtcgccatatttcgagtgacgaagaagtccatgagaattgagtcggacttgagacaaaggaaaatgttcgttggatgttacaaatatgagaatctcgcaattgattatggaaattgattcgatcttcttaattttatttagtgggttgtcttctttgtggaactaagacaacaatgattatctacacatagattagtccaaataataaaattcaaaaataaaaaacaatcgagaaagtactaaaaggcttcagaataattcaagtttgggcctaaattaatagtacaaaacattccactaaaaggttcttcgcaataaaggtttgggtcagttaattaacatatttatattaaattttaaaaaaacaataatgttgcagtatcatagttattgtatatattttaaattttaaatttcttacaaaattaaacatttatattttaacaattacgtatcttatctctacaaatgttcaaattgttttttttgcaccaaaaccagttttagttataaaaaaaaaattatcttgtttgaaaaagaagtccaacttgtttcgttgttgcaaaaaaatccgcaatgttgacccatagacaagatagatttgtttctttctttagacaaaacattattcaaagttttcattgatacccttcggaaagagccacataagtaacttgattatttttcttatttttttataaattttgtctctttttccacaacctaaaattatttaataatttcaaggaacacgttactcgggtgatgttgtgataaccaacagattcctaatccagcttgcacagccgaccaattgggttgataccatggtaaaacaaaccccctattaattcattttattttcatgtggatcaatatgcttattacatgattcattctaaacaacttgcagcacatggaggtactagaaaatttccttaatgaaaggcacagattgacactctctaaagaacacgctgtaattctcaaaccgtggtagggcaattacctacaagggaaataccgttcctttcaagccgcaaaaaacaggttgcgcgttcaatggaataaccagttcaagcggacgattcctggatctccatcaaaatggtttgaagaaattgatctcatcctgatgccaatgatttggaaaaactaccattagatagggctggcaatcaacttagagaactggtgtgtctacgtacttgatccaaactaccagctaaacgatgatcgtaaagttgatgagttcatggcacctattgtggtccaaatcccgtatttaattaacaagttctgaccgcctcgtttgtctcacgttcatgggttagctcctttcagttggtcaagaatgaaagggatctatgtcaacgagaggtctggggactgtggaccggtcacaatgaagctcatccaaatttctgcaactgatggaaatgcagagaaaatggctcctatcacataccaaattgtcaatgaattcaggggtcagtattctatagatctgtttcaagaactcgtcgcaccactttaccaatcgcccaccagctaatcagctttccatataagtaactcttcattaagctttgtgatttgttctagacattttagcctcttatcttcttatttgtttgatgtattcatgtatatatactttttcggctagctttatcagtttgatgtataagttgtactgaatatgtcatttatctgtttgatgtataagttgtactgaatatgtcatttctcataattagtccaactaatttttctgaagttattagaggttctaatggatatgtattcatggacacatacaatttctaccaaatatatataaatgagaacaaaatcctatttcacgtctgattttattacatgtggatagttttgcatggatgcacaataagtgaaataagggaaaatcttctcatatctacaatatcttattctctatattaaaacattgcgtctaagtatttatctccatcacacaactcgaatcatccctaaatcctctcaaaataattttttttttttcaatcgtcctccgtcatgtcttcttacattctttttcctttggttacagatatagttcgtcgaattgggatatcgggttttcgtaatctaggtcctttcatcgctgcatgtcctgaatggttagctattgtattttctgatgaagttttaaaggaggttggtcttcatgagttaattattgtctcctctttatgcatcgaagggtcgtcctaccgcccatttttgcttaggtgtttacagtctggcaacaacatggcaaaatacatcgaagggttacgactagctgctctagatggcccctcggttcaaactctaaatatgcttggcgaaggtgcagttcataacttacattcttattttgctttcggaaatttttatgttgtttgtggtaatccagaggatggtaaaataattaacgtggttttcaatgaagtttttcagaatcttgtagagtcacattagaagtcagtgagtcagttgtatatctcctttatagaacatgttacaatcaaaacattttcaattctcttttgaataatgagtaattcatgtcaacaaagatatcctattaatactttttatatatattatgggttcaaatcatgaaactttttgtattcaaaaactataataagaattatagttttaataagtgagcaactgaaatcaaaaccaaataaaaagaatgtagattattaccacagcacaacatctaattatctgtctattattacaaacttatagagaatcaatatctatacaagaacgatataataaaatttggaaaagaaaatgtacctcaaaatagaatctggaatcatgcttctatctcaacaagacttcagtgtctacatcgatttacgtctgcccaaactggtaatgtcgatagtggatttaagctctgttttgattaggttgcagaaatagacaaagaaaatgataagaactataatgttagtaagtgagcaattgaaattaaaaccaaattagaagaaagctgattatcagcatagcaaaacatctaattttctgactattattaccaagaaatagagaatcaatatcatctgaacaatttacattgtttgtatttgaatcaatagaacgatgtaatagaaccaaaaaaaaaggaaaattacctcaaatattgttctcgccagtaagaaacactcgactgatgcagtagcaagcttgagaaaattcgaatttggaattgagcttcaatctcacatgtttttcagatctggatcgatttagtttcaggtcgttgttgctggagttgccaaagagacaaggaaaatgaaggggtgatcgtaaataggctgaattatctgataatttgttaacacaatgtaccaaaattaattaatcatctgagattggacaatttacatttgggccttagaaataatatgattctctaattaaaatagtcaaatttctgttttattttcaaattatattcaacaaatttaaaacatacgtataatgttaatcaaataaccatgtgtacaaatgctgttactttacaagaaattcctactacttagaattcctactacttagtttatatgatttaaaacatatctgtctttttccatatatgtttatatgattgttggatcatgaccacacatgtatacaattttttgtgaaggtgtgatccaattcttccggtttagtctgatgtcgacttgattagaccggttagtattggttattgattgattgttggtttaagcatcaattgaaggtttagaagactggtttgaagtgtttgagaaaaggatcagaagactccagctggtttagagggtttgccgctttggtctggttctataaatactttgtattctcagcttctttctctttgtactgtatcttcttcttcttcgtttgtaatctccattgaagagctctgttcttgagtttctggagaaagacattaaatcttcatagtagattgatggattgaatgcagcaccagacatagattcatcacatcgatggattgaactgggtaaacaactttgtgtctttgttctttctttctgttttcattcacgattcaaaagagtgttcgattcttgagagttgagagagattgagctggaaagtgttaaggtttcgtgtggttttgagcatcggtttacaacagattggtattagagcccaaggttctttgggaaagataacgatggacgcgaattcaaacacaaacttgaaagcatcgtttcaagtctttaacgagaactcatacttctcgttatggaagactcgcatgaaagctcaccttggtttagctgggcttaaaggaattgttgatgattttgatctaacgaagaaggtacctctcactaaaagtgaaggaaagaaagttgaagaaggtgataatggaagcgaaccatcacagacgaaagaggtactagatcctgataaactgaaaagatctgaaaatgcaatgcatatgataattgctcacgttggtgatgcggttttgagaaagattgatcattgcaagactgcagctgagatgtgggagacgttgaacaaactgtacatggaaacatcactccctaatcgaatctatgtacagttaaagttctattcttttaagatgtgtgactccaagacgatcaatgaaaatgttaatgagttcttaaagattgttgctgaactaagtagtttggagatcacagtagctgaagaagttcgagctatacttttcttgaatggtttgtcattcaggtactctcagctcaagcatactttgaagtatgggaacaaggcattgtctttgcaggatatgatatcctcagcgaaatctctagaatgagaactcgatgatcagaaagaaatcgagagaagtccctcgacagtgttatacaccatagagagaggaagaccacaaaccagaaacaaccagaaaggaggtcaaggaaaaggtagaagcaaatcaaattcaaatacgagggtcacttgctggttctgtaaaaaggaaggacatgttaaaatctgagggacaaggagaagcatgtgtgattatagagaaactagtgttcactgaagccctcagtgttaatgaccaaatggttatagatttgtgggtacttgattcaggatgtacatcacacatgacttcaaggagagattggtttcgcagttttcaggataaaggataaattaccattctactaggagatgatcattctgtagagtcacaaggacaaggatccataagagtgaaaactaatggagggtccataaagattttaaacaatgtgaaatatgtgcctaatgtgagaagaaatctcattatcataggaactttggataagctggggtatcaacatgaaggtggagcaggcaaggttagatatttcaggaataacgtgactggtttaagtggaaatttggtgaatggcctgtatatactagatggagaaacagttgtgcctgaaagttgcagtgttgcagaaacaaaagaaaagactgcattatggcacaaacgtttaggtcacatgagcatgaataacatgaagatcttagctggaaaaggactattacagggaaaagaaatcaaggagctagatttctgtgaaaattgtgtaatggggaaatccaagaagctgagtttcaatgttggtaaacatgaagcagtggatgctctcaattatgttcatgctgatctgtcgggagcacccagtgtatcctcatcattatcagggaacaaatactttctatccatcattgatgacaagacaagaaaggtgtggatttacttccttagaactaaagatgaaacttttgagaaattctgtgaatggaaggaattggttgagaatctggtggacaaaatagtaaagtgcctgaggactgataatgggttagagttctgtaacacaaagtttgatgcctactgtaaaacacatggcattgaaagacacataacttgtgcatacacaccacaacaaaatggtgttgcagaaagaatgaacaaaacaattatggagaaggtttgatgtcttctaaatgaatctggattagatgagagcttcttggctgaagcagctactactgcagtgtatatcatcaaccgttctccatcttcagccactgatcataacattccaaaagtgttatggctgaacagaaaaccaggttataaacacctaagacggtttggttatgttgcatacgttcatcatgatcaagggaagctcaagcctagagccttaaagggaatcttcttaggctatccagcatggactaaagggtataaagtttggttgctagaagaagaaaagtgtgtgatcagtaggaacgttgtgtttcaagaagaagtagtctacaaagacttaaatggaaaatctgaggtaacagttctagaaaacttagaagctccaacatcagaacctgatgtgatacctattgcagtcacagaaccctctcacactaagcaaggtggagttacagtgactgagcttgaaattcttgatgagactgattcagaagaagaagaacctgttgagttgattacacaaaatcaatcacctgtaaatagggggttaaccggatatcagttagcaagagatagaccaagaagacagattgtccctcctgtaaagatgaaagactactctcagtttgcctttgctttgatgacagttgagaatctgaatgttgaagaagagcctcaatgttatcatgaggcagtttaagacaaagactgggaaaagtggaatgctgctatgggagaagaaatgagttctttactcaagaatggcacatggaatctagttgataagcctggagataaaagatcattggttgcagatggttgtttaagctgaaaccatgtattccaagtgtagaagctcagagatataaagccaggcttgttgctagaggttttactcagaaagagggcattggttatcaggaaatctttgcacctgtggtgaaacatgtttctataagatttcttatgactgtagttgttaatcttgaccttgaattggaacagatggatgtaaagagagcgtttcttcatggagacttagaggaagagctttacatgtaacagccagaaggttttgaatcaccagagagtaaaggcaaggtatgttttctaaagaaatctccactacaagaatattgagcatttatagcattatattgtagcagttaaccgtgttctgctataatttactaaccagctaaaatgttatagcgtttggtaatttcaaaacgctatactatcttaccccgggaaataaaatgacgcgggtcaatatttttagattaggggttattattcgatagcactaatctacaaaaaacgctacttgatatagtagcgcggaatgaaatttttttgctcgctggagaataaaatatttggtgacttttaaccccgaaatttttttctaaggcaaaaaaacattgttcgtgttctcactgttcttcatctcactgttcttcatctctttcaattctctctttgaattctctctttcaattttctctgttcgtgttcgtgttcgtgttcttcagttgtctgtctctctcccgtccctgttcgtgttcttgctcaacgcctcaatctctcttggtactcttcaacttctcagtcacagatctagttctaaatcgagaaggttatgtttcttttgtaatcgatttagggtttgcattgtgaaatttgtctggtttgagtttcgatttggggttttaatcacatttagcgtttgattttcaggtttctcagatttaggggtttcgatgtggggctttcgctatccgcgtttctcaaagatttcagtggcttctctttgacaggtatgttatttagatcgatttctgtggttcttagatcgattttgagtttcatatagctttgaacttgactattctcatgtatcgaattgagtttcatatagctttgatagtgagcattcatttgtatcgaattgagtttcaaatagctttgatagcttgtattcacttgtattgattagaacttgactatatacagtgactattgacttgtatcgattagaacttgactatttctgtgacttttcacttgtatccaattgaacttgactatttatgtgattcacttgtatcgaattgagtttatttctgtggtttttagtttacgtgtagctttgagtttatgtggttcttgtattcaatatagctttgatagtattgaatttttgtttttgaaatttctctttgtgtctttgttcttgtatctctgttaactaatatatatatatatatatatatatatatatatatataaatatattcatatatatggggttggagcttgttggtgttttaaaaatggataagagttgggtatggctgccaaggaatagcattgagtacgagaaaggagcaacaacatttgtttacgcatcatcgagacgtttgggagatccttctgaaatgttttgtccatgtacggattgccggaatctgtgtcatcaaccaaatgatactgttttggagcatctggttattaagggaatggatcataaatacaagagaaatggatgctggagtaagcatggggagatacgagctgataagttagaagctgagcctagtagtgaatttggagcttatgagctgataagaacagcttattttgatggagaagaccattctgattctgagaatcagaatgaagatgatagtaaggagccatcaactaaagaagaatctgactttagagagaagttgaaggatgttgaaactccattatattatgggtgtcccaagtacacaaaggtgtatgcaattatggggctttaccgcattaaagtaaagagtgggatgtcagacaattactttgatcaacttttgagtttagtgcacgacatcttaccaggagagaatgtgcttcgaacttcaacaaatgagatcaaaaaattcttaaagatgtttggttttgggtatgatatcattcacgcttgtccgaatgattgcatcttatacagaaaggagtatgagctgagggatacttgtcctagatgcagtgcttccagatgggaaagggataaacacactggtgaagagaagaaggggattccagctaaggtacttcgatattttcccatcaaagatagattcaagcgaatgtttagatccaagaaaatggctgaggacttaaggtggcattttagcaatgctagtgatgatggtacaatgcgacatccagtagactctttagcttgggctcaagtgaatgataaatggcctcagtttgctgctgaaccaagaaaccttagactaggactttcaactgatgggatgaatccgttctctattcagaacactaagtatagtacatggccagttttactagttaactacaacatggctccaaccatgtgtatgaaggcagaaaatatcatgttaactcttttgatacctggacctacatcacccagcaataacatagatgtctatctagcccccttgatagatgacttaaaggatttgtggagtgatggtattcaagtttatgactcattcttaaaggaaagtttcactcttagagctatgttgttgtggagtatcagtgactatccagccttagggacattggctggttgtaaggtgaaaggaaagcaagcttgtaatgtctgtgggaaagatacaccttttaggtggttgaagttcagtagaaaacatgtgtgcttaagcaatagaaaacgaccttgaccagggcatccttataggcgtagaagaggctggtttgacaacactgtagaagaagggacaactagtagaattcaaactagagaagaaatatttgaatcattaaaggatttcaaaaatgattttgggagacccttggagagaaacggcaaaagaaagagatcagatttgtgtgaggatgatgaatatggtgaagacacacatcaatggagatggaagaagcgatcaattctttttgaattaccatattggaagtaaatacctcaccttttgaattgtatcttgaatttaactttgattgactctaactgcttattgtttgtattgtaggaccttcctgtccgtcacaacattgacgtgatgcatgtggagaagaatgtgtctaacgccattgtgtctactttaatgcaatctaccaaatcaaaggatggcttgaatgcacgcaaagacttggaagatatgggaattcgtagtaacttgcacactcagttaagagggaagaggacatacttacctcctgcggtattttggttatctaaggatgagaaaaagagattctgcaaaaggctggctaggtttagagggccggatggatattgtaccaatatctccaactgtgtttctgtggatccaccagtcattggtggtttgaagtctcatgatcatcatgtgctccttcagaacttgttacctgttgctttgagaggattgctgcctaaaggacctagagtcgctataagtagattatgccactacttcaacaggctgtgtcagcgggttattgaccctgagaagctaatctcattagagtctgaattagttgagactatgtgccacatggagaggtactttcctccatctctgtttgacatcatgtttcatctgccaattcatttggctagagaggctcgcttaggtggacccgtccactttagatggatgtattcctttgaaaggtattgtctataactttgtctatatagttaattacttatataaaatttggatattgatctaatcttattaacttgcaggtacatgaaaactctaaaggcttttgtgaagaattttgcaaggcctgaagcttgtatggatgagggatacttagctggagaatgtatggcattttgcctggaatttctacaagactcattatcagttccagaagtcgttaaccgcaatgaagatattgatagtgattcacttgttcttgaaggcaaaccactagagaaagctacacaagtaactcttacgagtaaagagcgagacattgctcatagatatgttctaatgaacatggcctttatggatccatatgttaagtaagtgattctgcattattttctgtcagtattatttgactgtcattaacttgtattctaaacttagttttaaaactggtcacagcttgcatttagaagaactccaagctactgatgccagatgtatgaagaatgaaacgtttttatggaagacacatgcagaaaagttctcacagtgggtaaaggaaaaggtgattattagttgattttttgaagaacttagttgattttttgttttctgctaatagatacctacaaactcaaaggagacttcaacccaaccgagatggttggcctttggaccaaggcagattgctcaatcatacaaggggtttgtcattaatggacacagatttcacacagacgacatgaagaagaaaactcaaaacagtggggttacatatgaagcattttcaatgtgtagatcaagtgcaaaggatactagacagcaggctgatatagtgtcatactttggagtgataaaggagatcatcatgttggactatcacatgttccaagttcctatattcaagtgtcattgggctaacaaagggaatggagtcaaagaagaagacggattcactctagtcaatctctatttaaaccaaactgcttatcttcaagatccatacattctggctgcccaagcaaaacatgtctactactctagagaagacgattcttcgccttggtatgtagtaatgaaggcaccaccaagaggatatcatgagttagaaacaaaagaggagtttgttgcagcatcagtattaattcaggagaatgacgatatagggaatgaatcaagtgatgatgaaagtttttgtgttaggaatgactgtgaaggtgtcttagtagctgattaataggacagtagggagtctttgcgtgttggttaatgggagtttctgtgttggttaatggagtctttgtgtgttggttaatgggatgagtttttgtgtttgatagtattgatcagtttggtgtgtttcaggtaaagaatgtctactttacaacaggagaaccaacctcgccgcagtaagcgtatgcaagggatagagttgagctctacttttggattaaagaaacatagaaaaagcaagaaaactgtggcagaaaaagcagccatagccaatcatcaacaggaggaagagactgaacaagtagctgatgttcttggttcagacttggctgcagaagaggaagaagaacaagtagctgctgttcttggttcagacttggctgcagaagaggaagaagaacaagtagctgatgaagaagtccaaccagctaaaccagctgaagaagatcaccaaccacctgaagaagaaggaattaaagaagaaatggctgcagaagaagctggaactgaagaagagggaactgagattctgtccactgaatcaactcaaagccaccaatccgcaaccaagaaaaggaagacacggggaccaactaggatgcgtaaaatagcaaagcaacctgacgagaagctagaagttgaatttacttctctgggtgaacatgtaggttcagcatcagtcacactttcatctttccttggtcctcttgtgagagagcatgtacctgttttgcttcatgactggaggcacttacctgatgagactagggacacactctgggaagagattcaggtatattagtctcatttgctgagtttaatcattgcatgattgtgtttaactatgtgttttcaatgagtaggggaggttcaatttgaaagaagattggcaaaaggatgctgtttttaagcagatgggttgtgtgtggaggtcttctaagtcgaagctcacaacgaaagtgcgtgcagtgaagagcaagacggatttgctttcgctgaaaaaccaagtaacatacaatctgtgacggcttggaatgcttgggtgaagaacaggaagaccactgccttcaaggttgtgtatttttgtaactataaatctttagaagatgatttgttttaatggaaggtgattttgaaggaaataagtgacaagtacaggatgttgaggaaggcacatattccacacaccaccagccgcaaaggaatgattcgcctagtccatgagatggtatagtatatgtccactctgtaatcaattaagcttgtgtaaattggttaccatcaactaatcactatctgttttgtagaaaaaaaagagttccaaccctaaattggtgacaagaagcaaggtttggatagcaggtcatacacactcagatgggagacctgtcaaccctgaatttgcagagacgattgtaagacaatcattaacttgctttctttttttgttttgctagtacttattgtcattacattatgtttcaggaaaaaatcaaatctattgatagtaaaatggactcatcatcattcaccgatcttaaagaagatgttgtgagtcaagtattaggtaaagacaagcctggaagacttagaggtatgggcagaggagtcattgcaactaagttagcattcatgttagctagagattcacatgtggagaagcttgaagctacacaagctgatttgctgacaaagcttgaggacttgcaaaatgtagttaatggcttagctgccaaaaaggtaaattatctaactgaatatacttgtgctattaagcaaaattgaatgttatatgttactaattccattgtttttgtcaggaacatgttgaagaggtttctaagtctgaggctagtaatgttagtgcaggagttcgatatcagttacttgattggtgctcagatgatgatgttgttgtagtaggtgaaggtgaattctgttctgctgaacaaatgtacaagattggatggattccacttggacgtaatgctgcgtctgttgttgtgaagtcagtgtcagacgccacaacttctttgtgaaggcctacaccatcagttttcacacttggtgaagctttagggaacacgattgcttggcctttcgataagattattctagacagtgatgtatcatcaccttctgagaatcagactgtaggatcttcggtaatgtctttttctcatcacttgtcaattatctagctgaacctaaacactgactctagtaactttttatttatgcatcatgccttaggctaaagattcatcagccgttaaaatcatcataattgattggaatatggttggtctgtggttggtgagggtcagttgtgttcaacagaccgactagaacttgtgaacaatatgcctcttggtccttctactggaattgttaaggttgagaaagtgtttaacaaagacgcatatttgtggagaccaagtccaggaaagtttgtgatgggagatgtactaaatgagaacattgcatggccacttcatagtatacaatatgtgaattcatctcctccacagtatgaaacagcatcagcagaaaaagaccattaccaccatcagcagataaaagaccagcatcagtaaatttctgcactttaacttacagcctataaaatcaagtattatttctgcttgaatgcttggtattatttctgcctgaatgcttggtattatttttgaatcttgtagagcttaagccacagtactgctagcaccagcaaatctgccaaaaagaaatgcatcatgttagattataagaacggaagacaaaagagttgcagaaggaagagtatgtgcctctaacccttcagacacagtccaccatatgcccctaggtccaaatgcgagcaaggtatgtgtagaagtttcaaagattggagatgctgctgtgtggagaccaaactctgaaattcaaaccattgccgatgcagtaggtagtattgtggcttggcctactgataaaatcatgtttgtgtaaacatatgttggtttttttgttaagtactttgacattaaaatgtaatttgggatcttaaattttatataatatgaatttctttctaaattttgaatttatgatatctaaataatatgaattttttctgaatttgggattaaaaattaatttatgagctgaaattaattgaagaaatattgtataattaaaaatatcataatatataaatattgcaattaactaaatgctattgtctaattatatgtagtaaattaaatatgctatgtataatagttattaatatcagaaactaatcgctattaaataattaaagattgcagcagataaagcgctgtaattaatgaaataatgatagcagaacaaaaaaaagctacaatatgtctccgacctattatgacgaacgatgatagagtgcttctaataacgctatagtataattaaatagcatttttcgggcgctacaaatgctccatattcttgtagtgctctatacgggttagacaagctcctcgtcaatggaataagagatttgatagattcatgtctgaggaacgatttgttagaagtgttcatgattcgtgtgtctatgtcaagctgattggtgcagaaaatcatgtgtatctgttactttatgtggatgatatgttgattgctgcaaaagatatgtgagaggttaacaagttaaagaagagacttagtgaggaatttgaaatgaaggatctaggtgctgcaagtaagatcctaggaattgaaatcactagagacatgaaacaaggtgtattatgcttgtctcagtcagggtatctaggtaagatacttcaaaggtttaatatgagtgggtgtaaggctacgaatacacctattggaacccatttcaaactctcatcagtgagagatatgtcagaatgcattaacacagagaaaactccttatgcaagtgcagtaggaagtgttatgtattctatgattggtactcgtcctgacttagcctatgcattaggtctggttagtcggttcatgagcaagcccgggtctatgcattgggaagaagttaaatggctgttgagatatataaagggctcacaagagttgtgtcttgtgtataccaaagggaagaatttgaatattatgggttactgtgattcagatcatggtggagatcttgaaaaacaaagatctgttagtggatatattttcactgtgggagacaacacagttagttggaaatcttgtctgcagtcaattgttgcattgtctactactgaagaagagtttatagccttaacagaagctgtgaaagaagctatttgggttaaagggctaatggaagatcttggtttcaagcaggataaagttcaggtgtggtgtgactctcagtctgcgatttgcctaaccaagaacaatgtgttccatgaaaggactaaacacatgttgcgtaaacgggcatttatgagtgagatcatagaagaaggggaaataaatgtggtgaagatccacacgtcaaacaatcctccagatatgttgactaagtgtatcccaattcacaagtttgtttcagctttggagtttctgaagttgatcaagtgggactgagctttcatgctcggtttgctgaaggttaagtccatgtatggcatctactatgtttgatgaagacttgtatcaaggtggagattgtgaaggtgtgatccaattcttccggtttagtctgatgtcaacttgattagaccggttagtattggttagtgattgattgttggtttaagcatcaattgaagggttagaagactgattttaagtgtttgagaaaaggatcagaagactccagctggtttagagggtttgccgttttggtctggttctataaatactttgtattctcagcttctttctctttgtactgtattttcttcttcttcgtttgtaatctccattgaagagctctgttcttgagtttctggagaaagacattaaatcttcatagtggattgctggattgaattcagccccagacatagattcatcacatcgatggattaaactgagtaaacaactttgtgtctttgttctttctttttgttttcattcacgattcaaaaaagtgtttgattcttgagagttgagagagattgagttggaaagtgttaaagtttcgtgtggttttgagcatcggtttacaacatttatacgtacataatctatttatattttcataaaacttatatttatatttaaacctttaacgaactctactatatgattgtgatcgttacttttaatttttttatacatatattctttcgcgctgcgcagcttggatcgatacctagtacatttatttattgtacttgttttctaacgtcacgctgtttagatgactgaaaaacggcatgtagttttcagtccagatcatcatctctaccattcccttatggccttatctaacccaacgataaaacgcaggagccatagaagaataacagataaaactctctgtgtgagtgagtgagactcaaccatggcgtctttggctcagcaattctcgggattgagatgttccccactctcttcttcttctaggttatcgaggagagcttcgaagaactttccccagaacaaatctgcctctgtttctccgactattgtcgccgcggttgcaatgtctagcggtcaaacaaaggagcgtcttgagctgaagaagatgttcgaagatgcttatgaacgatgtagaacttctcctatggaaggtgttgctttcaccgtcgacgatttcgctgctgctattgaacaatacgacttcaattccgaaatcggcactagggtttgtctattctcttttacctacttcagattctttggggaatttgaaatatagttctaaagatatgagttttattacatgacaatggtggttctgtagaaattgtgtatcatttgtggttaatgatgttgttttaggtaaaaggaacagtgttcaagactgatgcaaatggtgcattagttgacatttctgcaaagtcatcggcttacttgtcggtagaacaagcgtgtattcatagaattaagcatgtggaagaagctggtattgtacctggtatggtggaagagtttgtcatcattggtgaaaatgaaagtgatgacagtttgctattgagcttaaggaatattcaatacgaacttgcttgggaacgttgcaggcagcttcaggctgaggatgttattgtcaaggctaaggtatgtttgaaacttgtttgctactattgtggtttctgtggttatagtttcaggaatttgattgttatgtgtaggttattggtgctaacaaaggtggattggttgctcttgtggaaggtcttcgtggatttgtgcccttttcgcagatatcatcggttagtagttgcctcagaactgtgaatatttcaaggttttgttagttgattttaagacgaaacacaacctgatatatatgaaatgtgttttcttctacatttttgtcagaaagcagcagctgaagagcttcttgaaaaagaaatacctcttaagtttgtggaggttgatgaggaacaaacaaagcttgtcctcagcaaccgtaaagctgtagcagatagccaagctcagcttggaattggatctgtggtcctcggagttgttcagagcttgaaaccttatggtgccttcattgacattggtggaatcaatgggcttcttcatgtcagtcagataagtcatgaccgtgtctcagatatcgcaactgttcttcagcctggtgacactttgaaggtatactcttaaacgtttaatttcagatgttaaaacaacagtccctaacttttaatgtacaggttatgatattgagtcacgaccgtgacagaggaagagtaagtctctccacaaagaagctggagccaacacctggtgatatgattcgtaacccaaaacttgtgttcgagaaggtaactctatttccattcaaaaaaactttccctattttcttttatgtctcaatcatttgctactttctgctgtctcaaggctgaggagatggctcagacattcagacagagaattgcgcaagcagaagccatggctcgtgcagacatgcttcgcttccaacctgaggtatcattctccacttgcctgatctcgtttatccatgcttattgatttcttattgcaatcaagttccaaaagtgtacatgtttagtaaccatctaagattttttccttttacattgatcatcacaaatgagttaatttggattttgagaattatgttgttgttttcggtatgttggtttgtttaaccataaccatagaaggttgtaattggtggaggataataagctcatgttgttgtgtgtttgaacagagtggactgacgctgagttctgacgggatactaggaccactcggatctgagttaccagatgatggcgtagatctaacggtcgacgacattccttctgcagttgatatttagattctaaagctttagtgtattttttcatacacaaaaacacctccttgagcttaattgaatatgtagtttacttcctacaagacattttatcatgtgtactttgtcttttgtaatcgatatgttctgttacaatgtcaagaaaccaaagaaaggctttgcccaagaccaaacagagcacacggtcttaaaaaaaaagatattgttaaatttttaataagaatttatccataacctttacggcagaacaggtgtcttgacaaagtttgtttagcggctgttgttagcaaatgtgattgggtctaccctattttgagtgtgattgaagctggagaagtaagaagaaactgtaacatattgtctaaagaagcaggaattagatgggtaggtttaccaaatggcttgtttagttctattcaaggatttcgacactagttttaaaatcaccagggaacgtgataggactatgagggtggtgttgggtatggatatcttcagactcattgagtatatggaggatcaaataggtactgaaatatttcaaatgtccaaagacttgatttgattaaagtatcttggagacgaggaaatggttagactaagaaattattcgtttttgtagggttctggctgattaagaatccacgtaacgttttggaagatggtgtgattaaatatcttaagcaagggataaatgtaaagcaccaaatcagatttcgtaccgttttcaataattttgatattttgaagaatgaagttgttcttggtggtggtgattcggaactggaaattcagatggaggtttctatgtgagtgtatcttgcgttaggattgctctaaacagacctgcgaggattccttcattctcgcacaaggttatcgtatctcacaaatttgattgatggtctcttctcattggctaatgatatgcaacatgatcaaactcatttgtctgaatctcaccaaagctcatagtttttcgacaagcccaaactgatagatctgcattacaactctctatctatattttatacgttataagaaacaagtcaagctttttttattattttataagttaaatttaccttttcaacttggtatgaaaatcatcaaagaaaatattttaatgcaaaccatttcttctctctattttatttcattgattttctagaaaaacacaaaacatattaaaactgattataaatatattatttttgtgatttatatttttctataattttaagccaatgatatttaattatttgtcttaaaatttaaaattcatcaataataattaataaatagtgcatagaaaaactaaaaaaaataatctttttgaaacaatttttttttctaagaaatgaattaataaagaacagaaggagtataatatagcttattatccaaaaatttaagcgaggtttcttctagttacaattatgttttgtaatactatgagatatattttccatataagatcaaattggataatagaaatttatggcatttcgaaataatacaaattgaaatgttttatatagaattccttagatggtttttttttttcatttattcttcgatactaaaatttgcattctttttttttgctaaataaaatttgcattctttaagaaaggccattaagcataggtagcaacaatttatctcgtataaatcaatttatttgatggattagtcatttgatccatatcagatataaagagatatttaatgggattagtcgctaattactatataatatcataccaggaaaggttatttgattatatgccatttaacaacaaacaagtcaaacactcagtaactgtacatcgattatcgattgatattttgggatcgatagtactttcatagtatcagtagtgatatattttcggattttagtaatccttggttaaattaacaaatattactaatagatgttaaaaccaaactactgatatcaactacaactagttgatgtaaaaaggtaggtagtaccattctactaatccaatagttttcaaaattgatgtacacaaatatttgaaataatctattaggttgtttaaaaaaaaatgaaagagaaggcgattaaagccataatagcattatcattcttattattgattacttattaaaaagagagggggatacaaaagcaaattaagggtagccgaggttgtcatggaaataaaagtcttgaaaaaacacaagaccaaccactcttatctcacaaacataaaagaagtttgctatatataattataagaaaattatagatatagctaaaaccttgcattaaaaagaaagcgataaaagatagcttccatgcatgttagggatttgattttgcggcggaaggagcgaggctagtaagaccatcacaacctgattctttagaggccaaggctgcaacgatcggattcagcttcgactcgttctcaacaaatgtcttgtagtctaaactcgtgtcttcataaatgtcccaccattttttcaccaacattttaatatcttctcggtccatatgctcctcttctccagtgaatctccaaggttttgagccctagaaaatgattcaaaattaacatgaccaacattaattagtaacatgatctattatattacatatcaagagtcctattaagagattaaaaacaaacatactttagcacaataatgaacaacattgatttggtcgaggtcaatgcattcgggatgacgccaaagcatagctagtacgaggttgtacgtcgaagggattggcttgtaaatatctctaaagtatatattcagaaaatcttataaatagataaacaataatattagatttgtaaaataaatgtaaataatgaaaataaaagtcttaaaaaatcctaattgatcggacctgttcggcgaatgaagtaggagtggtgacttgaacagtttgaagaagatcctcgtaagtgaggagatttggttcaaagaccaacatacccgcgttgaaatacaatggcggcacatgaccaagactgttcatcggccacctcactttttcgggcgactgttggcagtaaccaatcttgtattgaggtgtttttgaccaagaaccctcgcaaaaacagtctttgacggcgtacaagtagccagatggagtgtcaaatagatgatcgatgttgctaaacacttgtatgtctccatctaaatatatcatcttctcatattccacaaactgcatttatatatgtaatcatatggttagaataaaatatatatactataagacttaagacaaactttatacatatgttcttgaaatgttatttactaaattaaaacaacttctgagaataataataagcgttattattatagatttgtgactatatataaatcttgattagtatacggcacatgacaatttatttgttagataaaatgataagcgttattatttgtttctgttaaaaaattcacaaacattcaaatccacgtgtcactcaaagtaatttgtgggtacgtgtttacatgcaataaacgatagttgacaaagaaaaccgatacagtgatatacggatatatgcatgtaagtaagatcctacctcccaaattcgaagcttggagtagttgataacgtaataagccatagcataaccagcttggttttccggcggataaaccggttcaatctcccggatgatacatccttgagccaccaagatttgacggtgttctttcggtacgtctgggagcatagccacaacaagaggataagctgctttcaccttacgaagtcccttggctaaaccaaccacacccatccaatagtcttggttaccagctaggaaagtgacgtaagccctttttccatcattaggaatcaccgccacgtcagcctctacctttctttcgatgttcatctccgttggtgccatctcaaaagaagcttagtctctttagataagttttaaaagataagaactttttttttggttgcggttataagatatgtcgatggtgatattatataaaggagagaaagaggaagttgaattaattatggttttgattttgaatatcttaggggattttcttatggaaaacgttttttgattgtgattgacccgattcttgtttgccaagatttagaatcggataaagatattaaatctagaatcgtaaataatatggaaattgaaatattaattggtgtgataaatgttgatgtatatggtacataccatgttcttgtaagtcttttgtgtatggaatatttatttagttcaacgtggccctattattatatcggttttatcctaagttggacgttttcaagataccgttaattcatccgaatattttgtagattggagtttcctactactaattttttttctttattttttgaatatcaggaggttttggaccgaagcccgtaatttttccaggcccgaaaccacatcatgtaatattagtttcatcccaaacatcattcgaaccggcgacctctaagcttcgccaaaggtctttaccaattgagctaatgccagtcgaaaaaccaaattaggtattaagtttggtaaattcaggtcaattagtgatatttttaggtataaaatattcaaatgccatatacagtcgaaaaaccaaattagcataacaattagtctcactgtcttctttcagacctaaatacggatttgagtttgctaatttttgttggtcaaaagaacgaaaagattgcgatcacaaatgaaatgatgtttcgtttcataattgggttgaaataaaaacatgggcttcagaagttgggatttcatttgcattacaagcccatttcattgtccatggcctacaagagaggatgttctcaattcttatgaacgagacataaaaaatcagaatcaatcatgcaacgggaactcggtttagactatggaaagaatgtgaccaaaatggcttgagaaaatgatttcatacatgttaaaagggtcggtcacatttcatttcatacatcatcgtgtcttctcttggactgaagagctaaacgagcgtctctctctttctcaaactgtctgtaatcagctctctccaagaaaccaactttgtcgagatactgatccgagcttttcttgtacttatctagctcgtcttcaacacctttgtgttcttccttatactctccccaatctttcttcgtcttgtccaaaacactcagcttttgtttcttttttatctgctcaagaaccgcatcaaccgctgaaggcgctgctgaggaggaagaggagcctttgtttcccctctccaatgcttcctttgaatccgcttcaactaaccgctttacttcgatttcttgacccgcaaaatctttgacctcggttatctggaaataatcgagaagaacatatgtattaactgaatgaatacgccccaagtgcaaatcacagatcacagaggttcaattaattagattctattctaacacattccatattcctagttccaaaaagctgataagatcatagtaactaacaacacaaactcaaacaaaaaggaagttttatttatggattgcaacgcatcaatcaaaccacattaacttgagacagagattctagtcatccacaatccatcttcttacttctaaacagctgatacgatcaaagattctaagttatatcaatacaataacaagctaaaacacagattcaaacaaaaagcaagcattgttttcatatcacaaaggatcaatcaaactacactttttcttgagacgtagattctaatcctacacaatccaccttcctagttttaaacagctgataagatcttacattctaacaatacggtaccgcgccaaaacacagattcgaaccaaaaacaaactgtacatacggataaagaaaggttaaatcaaattgcattttaactgaaaacagagattccaaaatccatcttcttagttacaaacaactaatcaaacaattctgagccaaaaacaaagtcaagaaacgagctttaaacaatccaccttcctagttttaaacagctgataagattttacattctatcgatacggtaccgcgccaaaacacagattcgaacaaaaaaaaactttcggggatcttacatcctaacgatacagtaccaagctttaaacaatccaccttcctagttttaaacacagattcgaaaaaaggttcaatcaaaatgcatttcaacccaaaacagagattccagtcctccacaatctatcttcttagttccaaacaactgagaaggccttcgaatctaacaattccgagtcaaacacaaactcaaacaagaaatgaggtttattcggggatcgtaaaggttcaatcaaaatcaaactacattttaactcgagacagagattctactcctacaccatctatcttcttagttcctaaacaactaatcaaaccttagattcataaaattctgagccaaacacaaactcaaacaagaaacgagctttattttcttatcgtaaaggttcaatcaaaccacatttttactcgagacagtgattcaactcctacacaatctatctttttagctccaaaacagctgataagatcttatcttctaacaataacgaaccaaaacacacaaattcaaacataaaacttttctaacctcaatcttgccccggctcgatgcagctgcagccgttacagttgcgtttcgcaccgcagctaaagcggctgcagcaatactcttagcctcctcactacagctatgattcaaaacactcttctgtacatcagaaacacaagtatccttcttcttcacattcacaccgagataacttttccaattctgcaaattttttttgaaaaacacattcaaaatcccaaacgtaagaaaagaatcaaaacgcagagagagtagataaaaatctcacgctattagctgagtttttagcgggcaaagcggttgagacgaaattgacacgtttatttggaactccttcgttcattcgttgccaaatatcagcaactttcttcgatacagtgctcgaaccgttattctcaggcgattgctcatgagatcccatgtctagattcaagatacgtctctgttcaaaaggagtaaaatttcaatcgactcgtaatcgaaaactttttagggttttagaacaagaaaaaatcgtaactctatctgagattgaagagagacgaattggggaagaggaacagagagagttcacctacctggaaattctggcggacgaaaaccctaattggtggaactatctgcgtcgattgaggatgatgagcgtttgagaccctttttcttataattatctatacttttaagaaaataataaatagccccaaatgttttaaaaataacaaataggagaaatttcgatgttgaaaactgaaaaggtttttggaagtctagttatagattggggaaatccgtgtttgcactatcatcccattcttcagaaatcacaaaaaaaaaaaaaaaagagaaaccccaattctcttcgtcatttgacagactaacatccaattcctcagaaatcacaaaaaaaaacaattctcttcgtcatttgacagaaaaaacaaaaataattgttaaaaatatcatttccacattaaatttttatttatagcctctttaaatttttaatggtcattttatctctatttaaaaattgttttagattaacaaaatgaaatgttaatattttttttgcttgcaatattccaaaataaattttctgccaaaaaattcgaaaaaaagtttccaatcgaaatttttttttggcgggaaataaatttacaagagattttaaaagatttacaagggatttttaaagagttttaaaaaattttcaaaagatttttaaagggctttaaaagatttacaagagtttttaaaagatttttaaaggctttaaaagtgttttaaaagatttacaatggatttttaaagagttttaagagatttataagagatttttaaagggtttaaaagggttttaaaagatttacaagggtttttaaaagatctttaaagaattttcaagaagaccctttaaaaactcttgtaaatctttttaaaacctttttgtaaaggtttacaagagttttaaaatagttcaaaaattattaaaggggttacaagagtttttaaagaatttttaaatggtttacaagggttttaaatgatttacaatagtttttaaaagatttacaagagttttaaaatccaataaaaactcttgtaaatttttttaaaaccttttgtaaaggttcataaaagttataaaatcgttcaaaaatagttataaatgttttaaatacttacaactttttttctaagagttaaaaaatgattgtaaagactttataagagttttaaaaagattttaaaaggatttacaaaggtttaaaaattcttgtaaatccttttaaaactcttaaaaaactcttgtaaatcttgtaaaactattgtaaaaggtttttaaatgatttacaaaagtttaaaaaggggttttaaattattaacatatgcttgtcctaagctaagaatgttacttctaaggtcagggatgaaatagatgtcgggtaagagtgtttgttccccattctttccttcgaagataattgaccccttacctccaatgtccacacatgatccatctccaaacttcagctttcctctaatgttttcattcaactccgagaagaatgatctcacaccagtcatgtgattgctcgcaccattgtttagataccaagttccttcctcagttttttatttttcatacttccttggtattagattctcttcattgagatacacgatttcatgcatgtaaagggcttcatcggcctcaattgtctccacattattagcttcttgttgattctgttttctatcgggacatactgatgcataatgttctagtttatcgcaccgataacagatcacgttactcttttctttcttctccttggtttgttcttgatcggtttgataattgcttcttcctctacctcgtcctctgtttcctcttcctcctcgtcctctgtatctacttccatctgcgttagcatacatgagattctcttgtgtattgccttgactatttgatatgtcttggtttttactgatttctaacatagtttcataatgtttttagagtctttctagtctttttcgtatgctttgagtcatttcaggtacacttacacatctggaaactttggagcacaataaggaattttggaagcttttcagcaacgaagatcttgaaggacgttttttagaagctggtgtcgatcgacactacaccagtgtcgatcgacactcttattgctgccaagggaattttcgttttctaccaagtctttgagaagccctgaagtcttccttatttgcaaagtagtccctgcacgtttttagtcacgaatatacctaattgtttggtcattgttaaacctaagttttgtttttagtttttgttacacatttttgagagaagaatccaatcctttagggaggattctgaactcaattactattattcttaattcatcaatgcaaactattcagattatgatttgtgtttctattatcatgtttgagtaatcaccttgttgggtttagggactctcaatagggacttagatggattagtagatcgaaaaccccttaggattattcttaaagttcttcatcttgattattcttattgctagttttagattgctcacctagaacttgatattagataataggtatgcccaccataggtacttgttatttgaactatcatagatgagcctaggcatttaagaaagaacaggtatgctcatagaagggctctggtttagatactaggtgaactaatcaagcttattaacaatgcatgctttagcataggatttatcggcttctctggttatcttagctttaagtatagagaatttcgcggaacgccaccggttactctagaatcatagtttgagttcgagaacggtgcgttaacaatcttaatattagctagatctacaatttatctatctccctagacaattccttagacccgacgctttaatcaattgaatctacaaccatttacttgattatttgtctttaacattcaattacttcatttagcttattaaacaacatcataagtctattttgtgaacatcgagagctcactggaattcgacccttaagtgctaacgacgatctcttatttgagggagtaagcttaaggcaatttgagctacgtttgactttgaatcaagttccaaatatcttttggagtcccttaattacctacttgaagtgtaagggcttcaggtattgattgaaagatcaaagctgttgcaacgtcgttcttgttatcgtcggttaatccgggttcaatcgtatcccacactttatgcactcgcagcataaccctcattcgcatggcccatactgtgtagttagattgagtaagtataggacattgtaaagacgaagaaggaacgttctccttttgtgtggcgtcatattaagatgatgaaatgtgatcctcatggaggatgtttacaaggaatcaaggtacataaaaatgatttgtaaaagcaacatcattatatcttctggtttttgttaaacaatctactgccttgttgcttgttcctggaatccattgaatcttcacacttgtaaacctctgttgccaaactcttatttcttgaatcaatatgaagtgtgaagctccttgttttaccagtgattagcttcagtattttgctgttgtcgccttcaaagaataaataccgatgacctcgaatccacatgtgttgcatcgccatgagtagcgattgtaattctgcttccaaaatcgtattgcagatctgagctttgctctgtgttgcttctatataataaccttccacatcacgtaaaatccaacctgcattgataaaatttcttaagaacacaagacaagcttttaaaagaataactttcttttattgatgattagaaactctctcaaaactaagcaccaagctctctcaatattctcacacaactcttatggttacaactcaaccaaagagatccttatataggggtacaacttttcctattcctaatacaattaggattagataactcctaatacctaatagaatattctagacctatctaaatctttaacctcctcattaaagattactgggcctttagtcaattgaagtttacccaacattctcccccataagcttcaagttgactttagagaggtcttgaactccaaatagacttctcattgacttgaacttgattcttggaagggcctttgtttgaatgtccgcacgtagctcttcacgcggtacaaactccacttcgatttgttcattctcaacgcattcttggatgaaatgataccttctatggatgtgcttgcttcttccatggaatacgggattcttcgtgagctcaatagcggatttgttatcaatgtatatttttgacttcacaaaactctgacccgtcaattcgcttagcaaatcttggagccaaatagcttctttgcagcttttgttgcagccatgaactcggcttcacaagacgacatggcgaccgttggttgctttagtgagcaccaagttatgggtgactccccaaagtaaaaaacatgaccgcctgtgcttttaccatcattgggatcgacgttgtgactactatcattgtatcctacaatcttctttgttcctccacgcttgaaggttaagccaaaacacaaatttccttgtaggtatcttaagatctattctaaagtctccatgttgttttctcgggtcttgcatatatctacttgccactccaactgagaacgcaagatctggtctcgtatgcaacaagtatcgtaagcagccaattctttggcgatataatgtagcatctacttcgggttcttcttcttgtgctttgaacaaaactagaccaaactccattggaatgtgagttgggttacaatcgtctaggccaactttttttaggattcttcgtgcgtatgcctcttgtcttaacgcaataccatctttgtcttgtcaaacctcaattccaagatagtaagtaagttttccaagatttgtcatctcaaacttggatgccattccttctttgaattcttgtataattcccaaagagttccttgttacaaagagatcgtcaacgtacatggcaacaagaagtagctttgtaccttctgacttctggtacacaccactttctttcgaacactttgtgaacttcaagctctttaaaatctgatcaagttttgtgttccatgctcgtggatcatgtctaaagccatataaagctttagagagtttgaaaaccttctgctcttctcccttcttttcaaacccttcgggttgagacacatatacatcttctttgaattcaccatgtagaaacgcagtcttgacatcgagatgatgaatttcccaaccattagaggttgctagtcccacgagcaaccttattgcttcaagacaagctactggtgcaaaaactttatcgaaatcgatacccgatctttgaacctagccttttgcgaccaatctagctttgtacttgtttatagatccatctgcgtttctcttgattttaaacacccatctaagacctatcaccttaactcccattggtttctctattagtgaccaagtgttgttcttgttaattcacttgatctcttcttcacaagcatttgtccatttgattaactcctttgcttcttgataattattcggctcatcgttgatagatagtagaagcttctcacaatcgatatctgctagaagagcataatcatcaaggtagcttggacgttgtacttgttttactgatcttcttagcaccggtgggttctcaacaaccaaatcatcattagtatcatctatgttattactgtgatcaacatgagactcgtcttgattaatgtctttaccatcttcgtcttcttgcgggatgttgtcagtatcttgttctttttgaccattaccattcacatatggtccttgtccttcatccatgacttctccctaaaccatatgaaacatccctggtggtttatctgacttgtcatttactccaatccaagtccaactatccttctcgctaaagaacacatctcggctgacaacaacttgtctagttgttgggttatagagtctatttgatatggttcaaattacctagaactactctctcaaataagagatcaattgcagcattttaggatcgaattcatggagttcttttgttcaaacagtgagttaaatatcgagattaagctagcagggtatgagtgaaatagtaagaaaacaaaataagaaaacagcagattgattgggttgtaaacgattaggaaaagagctaggaacaaggtattctcaggaaaccattggttagtagatctaatgaaagctaggttgttatcgaacaattcttagactcaaactctaattatggaataaccggtgcgcgtgccgtgaaactccctatgtctatagctaatagtgaccggagaagccgagagattatcaacctaaatatgcattcttaacgagtttaattgttcatcttagtaaataggccgattcttattacacacctataaacctgactcatcaaataatagatccaactacagatacctatggcgggcatatctattgtctggattgaagatctagttaattactctagatctagcattatgaacaatcaaagatgaagaattctacagacaacctagcaaaggggacaatttactaaaccatatgaatccctaatgagaaactctattcctaataagcagattacttagacatattgaatgaaacaaacaacataattgagatagaaagcataaacacagtgaatagagaaggggaaagaaggcatctcttcaatgtatatagatctgaatgaaactctgaataacaatggatgaatagctttatgtctctcacaataaggttttgcaaagagcttgataaaagacttcatcaaagaaacttaggtataaaaacaatatatatagaccctaaaaacgtctagggactaataatgcaaatagggaagtcttctggggcaaacttgagcttctgtaaacttgaaagcgtctagggtttttgctgggccgaaactggtgtcgatcgacaccaagagtgtgtcggtcgacactcctcgcagattcctgaaccaaaatcgtccttagcttccttttccttagcttttgctccaaaatgtctccttatctccattgttgtcccattgcatagaatacctgaaaagacattaaaatgactcgagaaataacataaagactcaaatcctatacctaaaacatagataaaatctgtgaaaatcgggttatatcaactcccccagacttagcttttgcttgccctcaaccaaaacacaaaagtcgaacccttggaagaggttttaaaaacaaaggaactcccaacattctctagcctattgccatgatcattcaaactaaatccatatgcctaacaagtctaataaaatcctaaccaacatgtacttctctgcaagcttacataacattctagattccatacctaagtcccacaactatacccacgaagctttcatcgctgggtctcatcaaacaagccatcattcaagattcttctagactttttcctgtactataccatgataaattgaccattctttatatatatttttttttcttttttgctgttcttctatccctagacttattctttttagagagtaaacaaaggggaactcgcatactggatcgacaccctcgacatttttccaacctttgtaattgatcattccaaataatgtataataatggggtcataggaaacattcctacccctatacactatctgaaagtcgtctcaatctctcattataataattttttattattatttttaaatggggagaggaacatattcttgttatcactttggtctcaatatcaggtatgaacaaggagtcaagatctatgaacactaaccgcttgaaaaggtaaaaggaagagcagtgagattagctccaaccttagtggttgagttggaaactaggatatcctcaagtctgttggtttgctatctagattttccaatagtcagattgactcgaacctgcagtactcacaaatcaggcaataaataagagaaataaagatcatgattcctaactagactcacttttttttttttttttttttttgggaaataaaagaaataaccaaatgaattgcaaaacgaaaaatgataagaaacaaaaataaaagcatcattagtaagaatctcccccagacttaaatgacactgtccctagtggcaatcaaatctagagaaagcgggaaaaataaatcaaaaagaaaataaaaaaaaaaagaaaagaaaattcaaaccagtgggttgcctcccactaagcacttgttttgagtcagtagcttgacttggcggagtttaggatgtgggtggagtggtggtggtggattgctgctgcctcctctccttccaaggtggtgtgtaaacggatctggttcgagcagctgcaggtgtcgatcgacactcaggggtgtgtcaatcgacactcttcacgtcacctgcaaggacaacaggagaaacaagcttttgaggaactctaggcttgttttcttgtgaagcagtcttcgaataatctaaagaattaatcaaagataaaacaggagacgagagagaagagaacttatcacataggtcgtcaattggtgtgggccaaagagaatgtgcagaatcctctgtctgtgaaacccgagggtgtcgatcgataggggtagtggtgtcgatcgacactgttgccctacaactctcatttgcgagctgagcaaatgggagcgttgtgtgtggctctatggtgggattctgatcagtctggggaggtatgtctatgctggaagcaatgcaattgattggcttagtgagctctgaatcatccatgccaaactccatctctgaaccacaaaccttgagaaagattctccctctcttcacatcaaacctagcaccagctgtagctaggaatgctcttccaaggataaggggatccttgggttccttctcatagtccaggaccacgaaatcagcagggattatggagttaccaaccttaacaggaacatcttcaaggataccttcagggattctcttggaacgatccgcgaagagaagagtgatgcgagtaggcctgtagtgagtcatgcctagtctctcagcaacagacttgggcatgaggttgaagcttgatcccagatcacacaaagagcggtgaatctgcttgtggagatagagcaatcaaggacaaagctacctggatccggaagcttctcagtggtctgaccaggagtaatggtgcggatgtactcagctatatctactctttgtgccttctccttcttggccttaggcagcatgattgcactgatgtctgtggtaagcagcttagcttcatctgaactaattccattgtcaacaagtcgcttgacatacctgttgaatgaggcggaagatgtttctgaagcatccttaggaagagtatggaggattttctccattatggttgtgcacttagcagcttgaatcttctgcttagaacgacgcctcctcggataggggacaggaggggtgtagactggctcaggttgcataggtacttgcacctcacaaggtgcagtccggatccagtgtcgatcaacaccagaggggtatcgattaacaccatcgtattgagtcgtctctgagaagagcgtcccatatggtgtcgatcgacacaggagggtgtcggtcgacaccatctctgcaactgcaagctccaactcgtcttcaatgtccaattcctcccacacaacatctccttctctgatcaagatggcattgcagctcttccttgggttagcatcatgattaccaggaagaaaaccctcttgtctcttgatagattgtgcagtttgagctacctgtacatctagcttcttcaagtgagagctcagattgtcgatcttcccattaagatctgtgtagacagcatcaaacttgccattaaactccacaacaagctttgtttggctcttcaaaatctgctcaagcattgattccattcttgtctctgatgagggtggagggggggcttgataagttgaattgccataggtcctcagaaagttgctttgatgaaaagtcttctggaaagcaggctttagagtgtagttggaggaaccctggttccctgtaaacctgttgccactgaagttgccatttggctgcccaaacttcttgtatccctgaccatctatgtagaaaactccttcctctgactcaggctcaggctcaatagtctctttttcagctgcaaagtggacatgcttctttcctgtgaacaagttatgaactgaatccagcttagcattcacctctgccatctgatttcctgaaatagctccagcaatcttcttcctctcaaaatcagcattcttggtactgttgctgcaagcaaggttccctatcagggctgtagcatcagctgggtaacgtgtgttgaagttaccattgcttgttgcgtctagggccatcttgtatctccaatcaactcctctgaagaaggtgcctagaagttgtgcctcactgaaaccatgatgtggacaatctcgttggtactccttgaaacgaacccaagcagccttgaaagcttcagctgaaccttgtgtgaaggtagacaacttgtttctcaactcttcagacttagcatcatcgtagaaattgttcaagaaggctatcttgatgcttctccaagtcttgagggaacctgctttaagttgcttcagccaagaagctgcttccccagcaagtgaataagggaagagcgtgcatagtaggtagtcctttgaaactccattagcctttatgctcaaaacaagatcctcaaatcgctcgatatgatccattggctgctcatgagataagccatggaaaggatgctggccaactaaagcaaagtagccaggcttcagctcatagtcgttcctctggaatggtgggggtacaatcgctgatcgattaacataaaacaggtctagcctgttgaaatccccaagagtacgacgtggttccgcagttggaggaatagctgcaggaatctggtgttggtgtcgatcgacacctctgttgtgtcgctcgacaccaattgcatccgcgtgctgctcccgatggtgtcgatcgacacccagtttgtgttgctcgacaccgagtcctgctgcgtctctagcagctaattgcgcattgaggcgcgcctgatcctcattggcgtcctcaggtatgatgattccatgatcatccaatttctgaccagcctcattgtaggcttgcccagtctcatctctcaaaactccttctgcatcagctctgatgactctgtcagccattgctaatttctgagtttttcggttggtgcgttcaagttttcccaagtccagaacagacaagttgataagctcattctattttgtgctccttgtttgcctaggcatacacctgaaacatagaaaagaagaaacgcgtgagtaacaaaatagaagtaaaaactagacaaaatctctacacaaaactcaatgatgattcccaagaactttggcaacggcgccaaatttgatatggttcaaattacctagaacttctctcaaataagatatcaattgcagtattttaggatcgaattcacggagtttttttgttcaaacagtgagttaaatatcgagattaagctagcagggtatgagtgaaaaagtaagaaaacaaaataagaaaacagtagattgattgggttgtaaacgattaggaaaagagctaggaacagggtattctcaagaaactattggttagtagatctaatgaaagctaggttgttatcgaaccattcttaaactcaaactctaattatggaataaccggtgggcgtgccgcgaaactccctatatctatagataatagtgaccggagaagccgagagactatcaacctaaatatgcattcttagcgagttcaattgttcatcttagtaaataggccgattcttattacacacctataaactagactcatcaaataatagatccaactacagatacctatggcgggcatatctattttctggattgaagatctagttaattactctagatctagcattaggaacaatcaaagatgaagaattctacagataacctagcaaaggaggcaatttactaaaccatatgaatccttaatgagaaaccctattcctaacaagcagattacttagacatattgaatgaaacaaacaacataattgagatagaaaacataaacacagtgaatagagaaggggaaagaaggcatctcttcactgtatatagatctgaataacaatggatgaatagcattatgtctctcacaatagggttttgcaaagaacttgataaaagacgtgatcaaagaaatctaggtctaaaaataatatatatagaccctaaaaacgtccagagactattaatgcaaatagggaagtcttctaggacaaacttgagcttctgtaaacttgaaagcgtctagggtttttgctgggccggaactggtgtcgatcgacaccaagagtgtgtcagtcgacactcctcgcagattcctgaaccaaaatcgtccttagcttccttttccttagcttttgctccaaaatgtctccttatctccattgttgtcccattgcatagaatacctgaaaagacattaaacagactcgagaaataacataaagactcaaaatcctatacctaaaacatagaataaattggtgaaaatcgggttatatcactatacgcttttgatcctggctttatcccaaggtgcactatcgtttgagaccggtcatcaagcttcttcaagttcaccggctcgatcttagcatgtgcaaggcacccaaacactcgaagatgattgatagtcggtttcttgtttctcaaacattcataaggtgtttgatcttttaaagctcttgtaggaactcgattaatcaaatatgttgagtgacgcaccgcttctccccacaaaaaatttggaaccctcattgctttaaaaaatgcttcttgtcatctccattaacgtacgattccctctttcaactactccgttttgttgcggtgtgtaaggaactgttagttatcttttgatcccatcttttcacgaaaatcttggaattcttttgaggtaaactcaccacctctatcatttcgtagtgtcacgatcatcttatcacactccttctccacaagaggtttaaacaacttaaatttctcaaatgattcgctcttctctttcaacaaaatagtccacatatatcttgtataatcatcaattatcacaaagacatacctattatgagctaatgtagcaggagatattggtccacacaagtcagcatgaagtagctctaatggtcgtgaagatcgataggttgttgcttttgggaaaacatggcgtgtttgcttaccaactaaacatgactcgcatagttgattttctctctcgatctttggtaaaccatgaaccatctcacgcattgacatggtcttgagagctttgaagctgatatgaccaagtctcgcaagccatctcaatgtttcatcttcaattcttaagcttagacaagctggtttcccaatttggagattaatcttgtaaagtctgttaggagatctcaatactcttatcaagagtcttccatttgggtcatgtagcgttagatagttctctctcatcctaatgtcgcagccatgttcggttgcttgtcttaagctaagaatgttacttctaagctcaaggataaaatagatgtcgggtaagagtgtttgttccccattctttccttcgaagataattgcccccttacctccagtgtccacacatgatccatctccaaacttcacctttcctctaatgttttcattcaactccgagaagaatgatctcacaccagtcatgtgattgctcgcaccattgtttagataccaagttccttcctcagttttttctttttcatacttccttggtattagattctcttcattgagatacacgatttcatgcatgtagagggcttcatcgcccttagttgtctccacattatcagcttcttgttgattctatttctatcgggacatacagatgcataatgtcctagtttatcgcaccgataacaggtctgttcttgatcggtttgataattgcttcttcctctacctcgtcctttgtttcctcttcctcctcgtcctcagtatctacttccatctgcgttagcatacatgagattctcttgtgtattgccttgagtatttgatatgtcttggtttttattgatttctaacatagtttcattatgtttttagagtctttctagtctttttcgtattttttgagtcatttcaggtacacttacacatctgggaactatggagcacaacaaggaattttggaagcttttcagcaacgaagatcttggagaacatttttcagaagctggtgtcgatcgacactacaccagtgtcgatcgacactacaccagtgtcgatcgacactcttattgctgccaagggaattttcgttttctaccaagtctttgagaagccctgaagtcttccttatttgtaaagtagtccctgcacgtttttagtcacgaatatacctaattgtttggtcattgttagacctaatttttgtttttagtttttgttacacattcttgagagaagaatccaatcctttagggaggattttgaactcaattactattattcttaattcatcaatgcaaactattcagattatgatttgtgtttctattatcatgtttgagtaatcaccttgttgggtttagggactctcaatagggacttagatggattagtagatcgaaaaccccttaagattattcttagagttcttcatcttgattattcttattgctagttttagattgatcacctagaacttgatattagataataggtatgccataggtacttgttatttgaactatcatagatgagcctaggcatttaagaaagaacaggtaggctcatagaagggctcttgtttagatactaggtgaactaatcaagcttattaacaatgcatgctttagcataagatttctctgcttctctggttatcttagctttaagtatagagagtttcgcggaacgccaccggttactctagaatcatagtttgagttcgagaactgtgcgttaataatcctaatattagctagatctacaatttatctatctcccgagacaattccttagacccaacgctttaatcaattgaatctacaactcatttatttgattatttgtctttaacattcaattacttcatttagcttattaaacaacatcataagtctattttgtgaacatcgagagctcactggaattcgacgcttaagtgctaacgatgatctcttatttgagggagtaagcttaaggcaatttgagctatatcgctattgttgattctttcttcatatgctttgatttgtccaacaatgtcttcgaaacctgtaacttttaagtcaagtacttgttccaaggcagccacaatttgtatgtatttgtctcttggcaagctattaagaaacttcttcaccagtcttgtttcctcaattgcttggccaagagtcgatgatttagatgacatctgcgatagcctacttgcaaaattatcgactgtctccgtatccatcattgttatcttctcaaaataagacatcacaatactcaatcgtgcttccttgacacgttctgctcctacgtttcgactttgaatcaagttccaaatatcttttggagtcccttaattacctacttgaagtgtaagggcttcgggtattgattgaaagatcaaagctgttgcaacgtcgttcttgttatcgtcggttaatccgggttcaatcgtatcccacactttatgcactcgcagcataacctcattcgcatggcccatactgtgtagttagattgagtaagcataggacattataaagacgaagaaggaacgttctccttgtgtgtggcgtcagccacaacaacggcgtcaacgtcaaccattgttttgtgatgacttctctctcacgatgtttaaaagatcgattatccttaagctctgataccaaataaatttcttaagaacactagacaagcttttaaaagagtaactctcttttattgatgattagaaactatctcaaaactaagcaccaaggtctctcaatattctcacacaactcttatggttacaactcaaacaaatagatccttatataggggcacaactttgccttttcctaatacaattaggaatagataactcctaatacttaatagaatattctaaacctatctaaatctttaacctcctcattaaagattacttgggccttaagtcaattgaagtttacccaacattcacatctccaccattttgtttgtagcttgagtcataattacactttttatatcctttttctcgtttttgccatgcgtctttgatcaatcccaagtgtgtggtgttcgacgtatcgctgaaactcctctgttttggtatccagtcaaaagcatttttaagaacactagatgaattcccacgctacgcgtgagtttgttttgaaaattgtttagataaaaaaatgttaattagttttgttgctaatttatgtttatttgttgtttgttattttatacttagtaaaattagactcatgttatgaacttacattttttattgttagattcatttttgactctaaatatcaatttctatatatcttcatgtataatctgataatttttatatccaagattctaaaatttgtttattatcatgaatacacacaacaagaatataagatattttaaaacgatggaagtgtacatcgacgatatgttggtaaaatccatggaagaggaagaacacatagcccatttgcgcgaatgtttccggcaacttaacctctataacgtcaagcttaatccggcctaatgccgattcagagtaagattcggtgaattcctcggatatctagttacgtaactcggcatcgaggcaaatccgaagcaaatcgaggcgttattgggaatggcatcgcctcaaaacaaacgcgaagtgcataatctcgctacccccaaatggagagcttgctttagcaatcataatgtcatcttggaaactgcgaccctacttccagtcccactccatcgtggtgatgggatccatgccgctccgtgctatcctgcatagtccgagccagttaggtcgactggctaagtgggcgatagaggtcaatgagtacgatatcgaaccaaaactagacatgtgcaaagtcccaagtcctagccgactttatcgtcgaactacctactaaagaagctcgagagaatccgctcgatacaacttggctcctgcacgaggacggctcatcatcaaaacaaggctcgggtgtaggcatctgtctcacctcacccacatgcgaggttctcgagcaatccttcagactaaaattcgaggccaccaacaacgtggcctaatacgaagcgcttaagttagcttgggggctgaagatctcaaaaatctgggctttttacgattttcagctcgtcgcgaatcagttcaacggtgagtacatagctcgggacgaacgaatggaagcttatatagctcatgtacaaaatcaagcgaagcaattcgacgagtttgagttaaccagaattcccagaggagaaaacacgtcggccgacgccctagctgctctggcttccacatccgacctgaacctgaggagggtgatcccagtcgagttaatcgaaaagcctagcatcgagctcgacaaagaggaacatgcttttcccgtgcagagtaccgcgaattgcgaagatgcttcgaagtcgaatgacgtctcagacttggattgtgattcagaatggattgaacccatcagaagctatatatccgaggggaaagtaccttgggataagtgggaagctggaaagctgaaagctcaggctatgcgttttgttctggttgaagaaaaactcttcaagtggcgattatatgggcctttaatgacctccgtagaaaaagaagcagctcgcaaagttatgaaagaagtccacggaggctcgtgttgaaatcactccagaggaagagccctagccatcaagataaaacgccaagggtttttcaggccgataatgatcaaagacttcgaaaaattctcaaaacgatgcaaaaaatgccaaagacatgcacccacgatccatcaaccggccgagcttctttcatcaatcgcctcgccatatccattcatgcgttggtcgatggacatcatcggtcccatgcacgcctcgaagcagaaaaagttagtactcgtcctaactgactacttctctaaatggattgaggccgaatcatacgccagcatcaacgacgctcaagtcgataacttcgtatggaagcacattttatgtcgccacgggatcccttacgagatcgtcacggacaacggctcgcaaagtttctgcaataagtggggaatccagctaagcaagtcaacaccacggtctcaccaggggaacaaccaagccgaggcccaaacaaaacaatcctcgacggcctgaagaaacgactcaacgctaagaagggctcgtgggccgacgagcttgaaggagtactctggtcacatcgaacaacgtctcgtcgagccactggtgaaactccattcgcactagtctacggtacagagtgtgtaatccaagccgaaatgacggtaccgaatctgcgtcggagtctgtttctcgagcacgaattggataatacttaaagcatgctcgacgagttagatctgatcaatgaacgaagagattcagctttggtgcaaatacaaaattaccagaatgatacggcttgatactacaactcgaacgttcggcaacaaagatttcacgaatgagatcgggttctccgcaaagtatttcagaacactgctgagcgaaacgctgggaagctcggggcaaacaggaaaggaccatacttagtctcgaaagttgtccgacccggcgtctatgaactcgccgatttaagaggcaaaatcattccacaatcctggaatgccatgcacctcaggaaatactacaactaaatctgagaggcacaaacttgaactacgaagtggtttgatacctgaaaagggtacgtaggcagctcgtctttggacgagttcaactaccccctcattaaaaagggggagtgggtcctatatccatactcccatttttatttatcctgtaagttttcacttcggcataaataaaagtccattttatactctttctttatacaatgagcgacggctcggagtatcgtttacaccaaatcggttacagcgcgctatataaatatactacaagaaaattgccatttaccgacttcagtattagtcactgtatagtcgttaaacacctctttaggacaaataaacgactattaaatatagtcgctaatcgagagtcggtaaatacgatagtcgtattttagtcaccaaagagcgactaagttacgactaagtttaagtaatcgcttttttagtgaccttttagtcgttaagtttagagactaatattagacgacaaattaacgattaacttaaagggttatgtagtcgttgtaggtaattagtcgttaaaatttacgactatgttgtcactatatttaagactgagttgcgactgaaatatcaattagtcagaaattttagtgactaaattgttatcaaaaaccgactgcttggttacatttttgatgactaaattgcgactattgttgttattagaacacctatatgattgttctaaagatggaaaccttcctgagaaaacaaaaaattacaagaagcataaacacaatacaagaagcatgaacacaaatttattgtcatttcagaaaagtacaaaacccaaattacaaaaacatgttcgattcactacaacttagaactttgttcagcataagtacaagcaacacaagtacacatatataaatacgttgagccgtgatattgagtcttgaggaaggagttaagattcagatctatgaagcagatgaagagggagaggcagctggagagggtgagataggatatgtggttgtctccttagctgaatgagattcgaggaaattgtggaatcgaggatcattttcgcgcaaaaacttctccactaaggacaagtgctcaagcttcttcttctgctcatctgcagctcgggaattctcagcttcacgcaaagcaatctcagattcacgcctttgattgtaagagacctgctcttctatcttgcgttgagcttccagtaattgttcttgcaaagccacaaaagaagttgagtcacatgcttgcttccgcttgccattgacaagagactctttgaggcttcctactccataaggaacgcctctcgaatccctctcagtggactgcaaaatatgataaaagctgatattagagaatgaaaaagacaactcgaaaacactaaattgggaaacataaaacgttacctaaagaaatatggttgtacattccacagctgtgagctcccctgcccgcgaagtgccatctgaaacagcagaagcttcagcctcgagctccgactgcctcagttgcaaattcttctaatataactctgcaatcttctccgccttttgatcaacatacgtcccatcaggttttgtatgtgttttgatgaaaacgtcaccaatactgacagttttgcccaattgctcttcctgtaatgaaaaaaaaaacaagtcatagaaaagtagagaaacatcagattaaagttgcaaaggagtaaacagagagaagacttaccaattcgtctcggatttgatgatatgacttcgaccctgagaagtgtatgtgaggacctagactattacgatcagacatacgggcatttgaatagatttgacttctttcttgagcttcttcggtgtcccagtacgctatcattgttttccatagagtttttccgatccatttaggtttctttcgactagttcttgcagtgctaaccatgccttttattcgccttaaacagatctcattgaagtaaactgaacagtccttgtgatcaaaggatcccaatggtgtgttttctacaaatagaaaaggtaatgtcagtaaaaaaagaagtgtcatcatatatataagaagggctgaaagaacacttaacagcaaactcgaggaagtatttctcttgtctctcttgaggcacacatgtccagctgtagaagggaccatcaaatttgtttgtaaacactctagtgatattcctaacaagtcttgagtttgtgtcccgagtaaacctccatacacaagaaaaacaagcagttgttatatggcagaaaatatctaaatatcagaccaaagagtagcaaaacataaattgtggctgcaaagtatcatacaaacagatcatatagagcaaaacatagattgtggctgcaaagtatcatctagaactaaacttacacaatgacatacacgatacttggcctcacaatgctcattacccaactgaaccctaagatcaaaacacataacttaactacttgttctcgcaaacaacaagtagagactaacacaacacgactcttcaaacacattgcaatagattgtggctgcaaagtaacatctaaatatcaaagaccaaagaccaacacaacacgagacaaaaacgagaaacaattcaaacattttctcaatctaatcaatctcacaaagctcattacccaactaaaccctaagatcaaaacacaacttaaactactcgttctcgcaaacaacattataagaccaacacaacaagactcttcaaacaacagaatagattgtggctgcaaagtaacatctataatatcaaagactttcagactttcagaccaacacaacacgagacaaaaaaaataaacaaaagttacattttctcaatctaatcaatctcacaaagctcattacccaactaaaccctaagaacaaaacacataacttaaactacttgttctcgcaaacaacaaaataagaccaacacaacaagactcttcaaacaacagaatcgattgtcagatgcatccgtaacatctatattatcaaagactttcagaccaacacaacacgagacacaacaaagaaacaattcagacattttctcaatctaatcaatctcacaaaactcattactcaactaaaccgacattgaacacaacatgggatcacaaacaagagaagaagaagatcataccatgtcgtattcagtcgaggaatgggagagaggacggtgatgaacttatccctcttcggcaacataagtagatcatttagtgattgaagtgtgtcctcctagagatccggcgacagaggtggatattcttcgaagttgttgccttgaaaggatgggtggctgtgagccagagactcttgaactggaaaaggcgtagggtcttgctgagagggcggaggatcttgctgaggagttggaggaacctgctgagtagttgcggcttgagtcgctggattgttctgcacttctacggaggcagtcctttgcacttcacgttgtcgactgacaaagtgctggaaaacctgtagaggcggcggatagttccgaacatgagctgtcgttgattctaatggaggaacagcggcttctgttgcaggcgtctgtagctgaggagaccgttctgctgccagcgtgaaatcgtcttgagacggaagagaacgaggtcgtcgaccagccgtggatgtggaggctctctgagcaaggttaggactcgttcgcttcttttttcctagcccaaacatcgtgtaaaggagagatctagaagaaatcgaagaagaagaagagatttaagaggaaaacaaagaggtaagattgatttggtagggtttcgaagaggaaatcgaagagacaaattggagaagaagactgcagatgtttcgaagagaaaaagagttttttgttagggttttcgcagaacaagtgaatggtttgggcctaaagggtttgggcctaaaaggttcagtttgtttaaacattagtcggtaaattgtcacaaattagtcaccaattttgggcctcgaaatttttggcccaataatattgttatagtcgctaaactgtcagcaattagtcgccgtatttgggcctcgagttattttagcccaatagaatggttatagtcgctaaaatgtcagcaattagtcgctttgtttaatttttaataattgggtttgggccttgtgttgttttgggccttagatattcagaaatagtaattatacataaaaaatatagttaaacatagtaaacatacttagtcaaatatagtttttcaaaataatttaaaaatgtttgcatacttaatagaaataacttaagtacatatcataatcaatagaaataacttaagtacatatcagaaacacaaaactaatattgttcttcgtcttcttgttcttcatcatcagaagacgataaattacatcgaaattcattttctggatcggcatctaaatcgaggtttatggggttgcgattgattgtcaaattgtcgagtacaaaatcttctattgttgttatttaacagcattatcattttctgtttgcaataaactcgggtctttattttcatattctcctaatatgtttccccttggatttacttttaaaacattgagccactcccgctttggttttttcatgtatggataaggaataaagcacacttgttacgcttgagatgctgtttgtaaatgcaccatatttggagaattagatatttgtatattaactagaaaaactaaatgaccatatatatataccatacgtacctaaaataaagggttcgtatttgtagtatttccttgatgaaagaacgtcgacaacaccactattgctcctccgagtacctcttccgagcttagggtcataccacgaacatttaaaaagtgtgattttcaaactgaccaccccctcatactcaagttctatgatatcagttaagtttgcgtaaaaatctgcggcgtcagatgcatccgtataattttcacctttcagacatacaccatagttacaagtcttacgtccagctccatgactctgcgtatgaaacaaatagcctcttgtaaaatacattggccatgttttgactttgtgaaaaggtccatcgactatctcttgaacccaagttggaaatcgattactagagttccaatatgtaacctgtatgcaaatttagaaataaacatcattatagatatgaataacaataaataaatgcaaatcatatatagataaactatttacacatacataatctttcacccacacatgatattcctcgcctcttttcacgaagagttctttttcgttcaatcctggatatttaatagaaagaaaatcttcgaacatactataaagataaaaacaacatataagggttagtaaacaaacatttataattaaaaacctaaaatgggagtatgacttttgttatatacctcttaattacttgaaaataatcacaatttcgtataacatatccatgtgcgcattgatagtcttcctctgatagccatacttcacgtatttctccacttggacgactaacagaactaaatatattaggtactctaggaacatgatatacaggaacttcaccctcattgaatcttgttaacctgatccaaaagaggtaatacatggttatttttgcgcattgaaaaattgcttggtgctaatacgtttttaagtcaattaatcctaaagcattatcatgtcgttgtagtacttagagtgtcaatccaaatgggagtgatgaaaacagatgagatgtgatcagaagtcactaagtcaagccaagcaataacagttttggggtttctaacagtcctaagcgaacatgcagaaaacagaaacaataacagaattactaaaatcactcgaccacaacaggctgatgccagaagtaggatgtggtcgagtaacagacaggatatgaaacatatatactcgactgcacagtctattgccagacattgggtgtggtcgagtatactggtcgagtaacagacaggaaatgagacaactatactcgactgcacagtctgttgctagacactaggtgtggtcgagtaagttgatcgagtaatcgcaaaaactaagaaacagacaataagaacgattaagtgataacgataaaataggagaaatcagatagacgagaaattcttaaggatggggtaatcgaatagagtggtatcctagcttattcgaatggttaacaagcgcaatcaagctatccctagacaacaggttcaacaacagattaattcactcccgtgatagaaatcctcaagcaaagctagcccagactaattcccattaacgaaatctaactatgtaggcaataagaacacactgataaagtcaataaacgctctaaacggccaatcccttgggatagagacgaatatctcaggaactagtggatcaaattccagttgatcagaaagaaataagcagtaaacgcaactagtcctgaagggattcaatcaattctaaaacttaaccattctacagactacggattccacaactactctatcccatccttaagaactctatactgctcaaagacataaacgcaggtgaatgataatattgcataagtaaagagataaagagtagagaaacaagatgaaagatgaaatcaaatgcagaatctgaataacttgcaaaaatctcgaattacaggtttgtagaagcaaaagtggcgtagccagagtaaaacagaaaataaaactgaagcaaaaactcaatgtcgactagatgtctccggacagaaccctaagacatctatttatacaaagcgaaataaaatgatagtagacgggccattaacctaatcgcccggcccatagagtgataatgggccgagatgggcgtcgtgatccgatggagctccaggccgcttccaaacacttcttctcccttctctttcttgtgctcagcttgtctggttgagtgcggatttgaatagactccgacgatgtgatcgagtgcttggtcgagtgatggttctggtggtgagtgatgatactcgacctaggggtcgagtaatatggtagagtggacggtcgagggtggtcaggtggtatggcgaagtgatactcgatctgggggttgagtggcgtcatcgagtggcctgagctgaggttactcgaccacgaggtcgagtagatgggaagaatggctccaaagttactcgaccagggggtcgagtatgtcctctgattctggctcgcttcttccactttgctcgccaacagctccaaatcacctgaaaaccactcaagattgcaatatgtatgcaaagctatcctaatcgtgcaaagtgtgcaagaatgatgagaaatgatataaaacagtgatgaatgatatgaaactagactcaaaatgatgatgaatgatcactgaaaacatgcaaattatagacatatcaactcccccaaacttagtctttgcttgccctcaagcaaataagaagacatagttgaaggagaggtttgaaggtggggactcagaaccaaagcatcaaatagagcaaataaaatcaatgtccaagttggtagttctaagatgcgatatgatcgaattttactcaaaaacgttagccatgccttgttatcaatcaatccgtctcctatactcgacctacacatgctttcaaatctaccaatccctttaacattcattagttctggaacgtgaatcaagcaatgcatcatcaatgaactcatttggctaaggtgaaggtcaagagacaaagatggtcccttacagaataggcttcagtaacaggggatctctcaaaaaatgattgaactttagtagaatgctaaaggtaagtcccaagctatgcctacagagataagatcccatctacccagagtataacaatgaagctctaatggtaatcccaactccaatcctaatacaagaacttaactctaccctttgcactcgtgaatcttttaaactctttttcatatccttcttttcttttctcttaactctaggagaagctttctcaacactctgatacatctagcggatttggatttatttaacaactaaggttcctgtttttaatctttaaaaccaaaggcttttaacccttcttctttagctaacaagaacctcattcttttctttaacattcccaattactacattttttttttctaaattctttagcttacttcccctagaattttttccctttccttatcaacaatgaactcacccttttcttttaaacacatcccaacccatgatataagcgcccatctagtcctatccagtctgaaaaacgcgaactagaactacatgagatactctctctgtcgttacgaacctaacactttctaccaagctcaatcgaaataagacctcacaaacactcacaagtgatatagggcttgaaagaaagtttaggttttggttcgggttaactgctctaataaggagagtcagctacttggactaacaaaagtggtaaaaatgagtaagaaaatccaagtattttagggtatccatgagttcaaattcgatgccaagacatgataattctatatcagattcaagttcaaattgataggaaatggtatcagatcctaacagtgtggtcgagtagagcaatctaggcatggtgcagttttacttcaatttcattaactacgcatcaaacaattaacaacgagggcactgagcttatttggtgaaccaaaatgcttacaaggctatttcatcattatcccctatgcaactacatgaacactctgtttttgtgaagtcattttctgaaatttttcaatttttttgtttgtttttctatgccttaaatgaatgcagactcaagattctagacaatgcaacacacacttcctgagccctcccccaaacttaaatcacatagtccactgtgtgaccaaatttggaagagagtactcaggacaaaacacatcacagaaacaaaataaaaacaagagatggtatattacaatggtgaagtgaggtgtttacctcagtggaaaaaggagcggagttggtcgtcaatagctgcctgtgattgctcctaggccatcgaagaatctccctgttgtgtctcagcttcccccctgggggtactcgacctctgctccttcgtcgcggtcagcaccgctctgatgatactcgacctctctatttctgctgcagtcagcaccgcggtcgcgtaagctatgggactggagaagtcgtgtattcctgctgccagaccgagccagtgtagccttgttcattctcccgagctcccgaggctcgaatgatgaatgcctcgtaaggacctgtgagactactcggttactaggctcaggcctgtggtgacttggctcaggcctgtggcgacttgggtctggcgcgtcatatcccctcgagggcatgtcctgaggaggctctccctgcggaatagctgtggtagaagaggagcaacttagcttgtctgtcagaaacttgatggccttgaagcacttgatgagtagcctatcttgtttcttgcaccacttctgcaacttgttgttgtttctgtgagcttcgctcaagctcttgctctccctcgctgggggtacatgctcactgaaatgatacatgctcgtatcgtcctcctcctccctatcctcatctgtctcagcaatctcatcctctttagcttctgttgtagggacattgtcatcagtcggtggagcgctctcaaagtaaaggtaatcacgcgcaggcttgatgttaatgttttcgccctggaatatggttgtggccttagtgcagggaagcagaatgttggctgttcgggtaaaggagtgctcgaatttgtagcgatagaaatcgccgaccatgtcgtgctccagaaactcacaacgacgcaagtgatctaagtctatcatcctcggatcgaaccctggagacgtgaaaggtacaccaaacaaagggctcctggcgacctgttcttcccgttggtgtgcgcccacttcctatatctacccaggtggatcaacagaagcataactggtggtgcatcattgaggtcgcccttcaggcccttctttccctttgtgctgcggagaatgcccttgagtgcagaatcaatcatctccatgtctgtgttagatacggtgcctgtagattcgctagagtacagaatatttgctaaagagcgttgatagtaacggatcacagggcttcgaatctggttgctcttggacctcgcagagttgagcgccatatcgttcccaatagttaaccacaaatccttcaactcttccctctcgaacttgggtttagttccctttccactggggaaaccaaacaatccttccaagctcctgatagatagctggtaatgctgctcgctcactgaaaaagtcaagaaccccaacccttcactctccagctcatctactgtaagtccctgatacatctacacttgcagagtggagagaaactctattgtttccttcttgtaggtgacgtacgggtaagacattaatgtctccagatgacacttctcaaataagtgttgtacgtcctccagtagccccagctgggctaaagtctgataacaggggtacctcattccccagaagtcgttcagatcgaaaattctgatgtactcctccactgtaacttcatcaggcctgttcaacagcttcgtctctctgggccatgactcaggctcatactcgacgtcaatatcttcgtcgatcaatgcatatctactggtcattgcactttttcctctagcaatctcagccctcctttcattgcgtcgagctactgagcgttgggtgtcagctctgaaactctcataagcttgttgctctctctccggtctagttgaccaagactcagcttcctcgacgttgtaatccgcatccatagaggactcgccactgtagttactcatattgatttcctgaaaaaaatacaactcaaactaaacgtcaatatgttagtttcaataagcgcaaatactaaaccggccgagtataccagtcgagtaaactagtcgagtacattgaaattgtggcttcgagttttgcggttttgcggtcgagagaaagcgaatgagagacggcaacgatgtggtcgagtaaatggaggtgatgagagtaggtgaactccggttgaccgattgagaggcgtggagagatgagcggtcgagtggattggaggaggcttgaacggtgaggagggagaggtcgagttatggtcgagtgagaaggagagagagaagctctggcggtttgttggaaatcaagtgaagagttcttagtcagaattgttgcatggtcgagtaaggagagttcgaggtgctcctacggtcgagtgaagaggagacgagagcggtgagagatgataaaaccggtcctgtcgtcgagtgaaagagaaagagggcggtggcgtgagcggcgagggctgtgttgtggtcgagtgagaagggagacaaagcggtgagagatggtgaagccggagcagtgagatcgagtgagcggtgaggtcgagtgtagtggagaggtcgagtgtttggagaggaagagagatggtgtcgatgggaaaggaaaggggattaggatcgagtggttgggaaggagggaggggatttcctcatccttagaaacgcgtggggaaaaaaaaatgaagaggtggtgggccacgctctgtctgtttgtcctgaagcgttgttacctttttactagaaccttctgaatcctctgtaaacttgataaactccctgtaagtctttgtagcttctgttggtcgagtataagtataatttcaaatttttggtttttaaaatcatcactaatactcgacaaacctactcgatctcatggcctctgagtgcaatagaagtttttcaaattcttgaatttctgacatactcgatcccctgttgctctgtagagtaatatttttgaatttttactctacctccacgctgtttctctgttcctgaggatcacaaatacaaccaaaagcaaataaaaaataacaaggaaataatttttttatttacaggaacagtcttgggaattcctcctaagtgagcttgtttaaagtctctaacttgactcctcacactcattaagaagaaaatgggtgatagagaggatctgcatagtcctctctgatctcatcatcatattcagcatcctctcttgagagatgagtagcagaatactcaattcttctttcctcgaaataggcctctttctcttctggtggataatctaactcctcagaccatcttgaagtaaacttttttctcgggatagtatcaatcccgcattttgattgagctttctcttgcatctgatccagtttactcttaagttcctcaactgtctgagctagcttctctatggtttcttcttgctcatcagatttctttttgagatctcacaagtcaggtgtagaggttgtgcttggtctggtgattgaattcgaaggttgaggttgagccctgatcttttctcttacagctgtcctttgcgaagtttcgttgatatcaaactgtagcttgatgtgcttcccaaggttaagacttattctcccgtctttgacatctatcattgctcccactgacgctaagaaaggtctccctaggattagaggatccttaggttctacttccatctcaagcacaacgaaatctataggtacttccactccataaatcattactggcagatcttttagcaagccgaagggttttcttgaagacctatcagcaaggatcaaagtcaggtcgcaaggcctgtactgagtgaattccagcttccttgccacggagagtggcattaaggttactgaagctcccaaatcacatagacaattgttgaaaaccaattgaccaatggaacatggtaaagtgaaagttccaggatcttccagtttttcgtgaacactcctcttaacagtggccctagacggattagcatcacattcgtcttttgaatcttgataaatcttgatcctttccagaattgaatttctcacatctttgtgaggatccgagatcaggttgagaacttctattagaggcatcaccgcttccatctcatcaagctgcttttctacaagagaattttatctttctatccatgctttcctgaatttccatggaagagcacgtgaaggtaatggtgctggcttgaatctttttaccatcctctcaatgatggctgctttctcgtcaaggttggaccgagtttaaaaacgggatcctgctgaattgtcgagtccaacaactgaaatttcaatttgagtagaagcctccccttcctgaacatcactgttctcagtgattaagttggagacatgtcgagtaggtagctctcgatcatgacagatggtgatagcgtgagcggtggcgtattccttcgggttctgtatggacttccctggaagtcctgttactttgggagtagaggtcgatgcagattgtccttccatgtatctgaccttacaagtaagtgcctcaagtttgatgttcagatcgttgaaagtgcaatcaaccttcttgtggatttctgccatcttttttgcgagatccattgctcctgctgcttgtccctggagaatctgctgtaacatgttcttcaagtctgaatctggagttgttgaaactggtagttgttgctgctgtgtgaacccaggtggtggaagttgctgcggatagttgccctgatactgctgcttaggaacatacgcctgaccttggttgtatggaacaaagggcttgggttgattctgctgctgtgaagggtagacttggtcctgcgggtttgcaacatttgtacttttgtaagacagattgggatggttctgcttgaagttgttgaaacctttgttgtaacctccttggttttgcacatagctgacctcttctgactgtagagtttccccatcctgaacttggaacgtctcatcatcacccaggaaatgaatgtgcttctgttgcacaaggagtagcttgtccagtttgtcattcatggctttcatttccctgcggtgcttctcatcagaatcagagctgtggcggatgcttctatcgtaatcttcattgtagttgccatccgactgtgccaagttctctaccagctcccatccttcttcaacgtctttgttgaggaagttcctgttagaagcggtatcaagaagcatcctgatcttcggaaggacacctctgtagagagtgctgagaagtgaagctttggagaaaccatgatgaggacattgcgtctgataacctttgaagcgctcccatgcttcacaaaaggtctcattatttgtctgtgtgaaacctaaaatatcattccttagtctcgcagtcctggagtttgagaaaaacatagttaagaaggctttcttgcagtcattccaggaggtgatagagccttgaggaagcgacttttcccactgatgggctttgtctccaagagagaatagaaaaaatttgagcttaaagccatcctcactaactccattgatctttgttaggctgcagagcctatcaaactcgtccaagtgatcgagtggatcctccatagagaggtcatggaacttgttgctctgaaccatggcaatgagaccgctcttgatctcaaagttgttgttctgcactggtggaggcacgatgccaatacgctgattgtggttgcgtggtgcatcgcctgcaccgatgttgtttggctgcacttgctcatctacaactgcagccattgtgtctgtttctgtctgtgttctgagttggcgtgcaatacggtcgatgttatcattgaataggagattctgatttccttgtgaccgtgtttgcatacaacgagtaccaactggtgaagctggtgattcgcagtacctgaatcaaaacagacaaacagaaaaaatacatagttggtaactttcagtaaaaatgaaaaagaacttgatcttaaatattctgaaatctcaaatatagcaaacaaacacccaattggcaatgacgccaaattgataataggtttttaagtcaattaatcctaaagcactatcatgtcgttgtagtacttagggtgtcaatccaaatgggagtgatgcaaacagatgagatgtgatcagaagtcactaagtcaagccaagcaataacagttttggggtttctaacaatcctaagcgaacatgcagaaaacagaaacaataacagaattactaaaatcactcgaccacaataggctgatgccagaagtaggatgtggtcgagtaacagacaggatatgaaacagatatactcgactgcacagtttgttgccagacactgggtgtggtcgagtatactggtcgagtaacaaacaggaaatgagacaactatactcgactgcacagtctgttgccagacactaggtgtggtcgagtaagttgatcgagtaatcgcaaaaactaagaactagacaataagaacgattaagtgataacgataaaatagagaaatcagatagaagagaaattcataaggatggggtaatcgaatagagtggtatcctagcctattcgaatggttaacaagcgcaatcaagctatccctagacaacaggttcaacaacagattaattcactcccgtgatagaaatcctcaagcaaagctagcccagactaattcccattaacgaaatctaactatgaaggcaataagaacagactgataaagtcaataaacgctctaaacggccaatcccttgggatatagacgaatatctcgaattaaagatgaaatcaaatgcggaatctgaataacttggaaaaatctcgaattacaggttgcagaagcaaacgtggcgctcgtagggctcgaagtaaagatcatcctcaaccttcacctggggaaacaagggttcagacacatctcgccaattcgatgttccagcctcgttagcagttgggacatgaggccttcgaacaagagatggctcaggatcctctcgaagatcgagttcccgagatatatcagcggaagtatcttcttgagccatgaaagggctcggctcttcgggcgtattagatgatgaagtcgcatcaccctggtgactcgaactcggttcggcatcttccgacgagctccaaaccatcctccttttatggatcggagggagatcgtctcggtgcacggagttttgacaaagcaaaagccgtaaccagaaatttctaaccaggaaaatcaaaacaaacctaaaagacgacggaggttcaccggaaatatagaagaatataaagaaatcaagattagaggagagaaagaaaacctcgaaactttttccttcggaacttcaaatgaaattcttaaagaatgctttattatttatagaacttttagggtgcgttgggttcggaggaaatcacgaaccgcgtcgttggcgcgtggcctcgtcaaaatacgggacacccgcgtgaacctcgggaattagcgaagacatttccccttctcgagagaaaagagcggctacacgcaaagaagtttgaccgtcccggaagttgaagcgtcaaaagctgcgggataggaaaacgatcggccagctcggtcaccgtactcatacagctcgttgtttctcgcaataaaaataacgaggtgggggcaaactgttggggtcggatttccccagaagaccgagccaaacaaaaaggcttcgggagctcagcctactacaaacagtagggaaactattcacaggacgctactcgctcgggtatccgtacccggttcggttgtcattccaggaaacatacccgagccgggaaaggaaacacttgggattccgagatgaaactaccatgcggcttggttgttattccaataaacacacccgagcagagaatggacgtctagaggatcatttagggtcgtctaggaggacttctggtcgcgtagaatatgcaccgagctgattcctagcgtttcatagtagcctgaggcaaagactttgcacatcttaccaaaacgatccaaagaccatttccgaagaatccagatatgataatgaagaatcttcgagggtatagccgaatgaagaaatttcggttatgtgagtttcgactctcacagtgtcctaatgcgaggtagctccaacttccatcggagagccacatggcagttgatgtgacggagtttgctgatctacttccgcttgtgagttttggacactcgtactaacggttccctgaaagtcgagctgtgcttagactcctgcggtacacagcgttcctgtagagagagtgtcaactcgatctacatacgcgttgtgagcttccctgatttcggaatgactggtggtgagcgctgcgagctggccactgcattcttcttttcggacaaagacgtttcggtggactgctgccgctctgttttgtcggaaagctccttaagcagcttcttgatatcagcaagggtggaggcatggtcgccggagttctggtcgtcggtgttactcatggtagactgatcgttgctctgaagtaaaacacttaaaccacccttcttctagcgccaaattatggatgtcagaatccgcaattagaatttcgtggttgtatttcaaagatctttaaacttgttagtcgaacaacaatcagctgaaatgtttcagtatatttcagtattcttttagtaccattttcggtttttcctagtaaatgacaatagttctctatttatacaattacaacgaatcttgcgaactaaatgtccagctgatatcgcttcactaactccgtacgttatgaacatccagctcagtccgcagatcccgcttcagcgtatgttacgaatcttcaggtaatcaatgcgtgttattaactcagaatcttttcgttaacgaagcaatataaaacggtttctagataactggcctagtgatgggcttttccgcttggtcgggcctttctcaaagccctacacactccaaatgtctcaccaaattgcgggtttggttagcaccagatccgacatccacaatccctttaaaattcattagttctagaacgtgaatcaagcaatgcatcatcaatgaactcatttggctaaggtgaaggtcaagagacaaagatggtcccttaaagaataggttttagtaaaatgagatctctcaagaatgattgagctttagtataatgctaaaggtaagtccctaattatgcatacagagataagatcccatctacccaaagtataacaaatgaagctctaatggtaatcccatctccaatcccaaaataataacttaactctaccctttgcattcatgaatcttttaaaccctttttcagatcattcttttcttttctcttaactctaagagaagctttctcaacactttgatacttctaacggatttggatttcttgtaaaaactaaggttcatggttttaatctttaaaactaagggctttttacccttcttctttagctgacaagaacctcattcttttttttgacattcccaaaacctttactagactttttctaacttttttagcttacttcccctagaattcctttccctttccttatcaacaatgaattcactattttctttcttttagaaacatcccaacccacgatataagcgcccacctagtcctatctagtctggataacgtaaattagaactacatgaaacactatctctttcgttacgaacctaacactttctaccaagctcaatcggaataagacctcacagacactcacaagtgataaaggcttgaaagaaggtttaggcttaaggttggggttaactgctccaataaggggagtcagctacttggacaaacaagagtcctgtaaggaagtccaagtattttagggtatccatgagtttaaattcgatgttaagacatgataattttaaatcagattcaggttcgaattgatagagaatggtatcaaatcttcacagtgtggtcgagtagagcattttaggcatggtgcagttctacttcaatttcattgactatgcatcatacaactaacaacgagggcactgagtttatcgggtgaaccaaaatgcttacaagactatctcatcattattccctatgcaatgtgaatgcaacaatcctatatgaaacatcctagactcaaccctaaatgtgatgcaactacatgaacaatctctttttgtgaaatcattttcaaaaaattttaaaattttgttttgttttttttatgccttatatgaatgcagactcaagaatatatacaacaccacacacacttcgtgagccctctcccaatattaaatcacacagtcctctgtgtgaccaaatttggaagagagtactccaggcaaaacacatcacagaaacaaaaacaagagatgttattatacaatggttaagtgaggtgcttacctcagttgaagaaggaacgcagttgatcgtcgatggctgtctgcgattgctgctaggccattgaagaatctccatgttgtgtctcagctccgccatgtaggtacttaacctcatctcctctattgcggcaagcaccgcctcctgaatactcgacctctctttttctgctgcggccagcgccgcctcatgaatactcgatgataataggattttaagatcaattacacataaaacactatcctgtcgttgtagtattttaggttgttaatccaaatgggtgtgatgctagcaatcaagatgcaatcagagttcaaaaagtcaagccaagcaattacaggttttgagtttctaggagtccttagtgaatatggaggaaacagaaattcaagcagacacagttaaaacactcgaccaacacaacttgttgccaagcactgggtgtggtcgagtgacaggttgagtaacagacagaaaatgtaacaggaatactagactgcacagtctgtcaccagacaacagggtggttgagtatctgagtgataacatgcaagaaatgtaaaaattaagcaataggtaacaagaaacagtaaacgatagcaatgtaaataaagaaatcaattggatgagaaaattctcgaggatggggtaatcgagtagttagtttcctcaatctacaggtgactgacatgctcaataaactatccctagacaacaagttcgataaccaaatctaagtgccaccgcaacagagaccctcaagttaaactagtcccagactcaatcaccattgacgagagctaacctaacaagcattacaaatcaacaagttaaagccaaaacgctccctgtaaccaataccttaggagagagccacgagtctctctaattagtggttcagacatttcgtcgaacactcttttgggtgcgaaaatgtatgggctcaaattctagttgatcagaaaccaataggcattaagaacaactaatctagaagagatctataaatcaaactcaaccacctaacagactaaggattctaaactactctaacccatcctcagaaagctagtcactactcagacttcattgcagaaaacaaaaacgatgacatgaatgaaaacatcatagcaacagaatgataagagaacgataacaggatgatgaacttagtaatgaaaagtgaaatactgggacttcctcccaagtgagcttgttttaattctctagcttgactcctcacactcattaggcttaaggagggtgaatgagaggaattgaaatcttctcttcttccttagtagatacaacatcgtacttagcatgctctcttgacaggtctgtaattaagtactctatggccatttcgttgtaagcttctttttcttctaatgggtagtcttcttcttcaaaccattctgaagcaaacttcttccttgggatagcttcaatgctaagttgaggttaaatagcgtcctctgcatccgacgcactttatccctaagttcctcaacaatgtaagttagcttcttgatggtttcttcttggagatcagacttccttttgagttctccccaatcaactacatagagcgtactagattgagttgttgagtttaaaggtcgtgttcgagctaaactttgtttctttactctgtaagtctcaaatccttcttttgtaaccactccttggaccccaaatgtatgtccctctatggttgatcttcttggagttttgttgatgtcaaactgtaaccttatatgcttccaattttttacgtctatcacctctcctcctaaggccaagaaaggtcttcctaggatcagaggatctttaggttcttcatccatctcaagcacaacaaagtctgtaggcacttctactacattaatcttgataggcatatcttctaataggccataaggttttcttaaggttctatgtgcaaggatcaaggataagtcgcacggcttatacttgagaaatcccagcttccttgccatcgaaagtggcattaggctgactgaagctcctagatcacatagacagtttctcaaagcaagttgcctactagagcatggtagagtgaaagatcctggatcttccaacttttcctgaacaatgttcttcaggatgattgcactgcactcgtgagttaacgccaccattccttgaacttctatgatcctctttgaaatcatgtccttcacacagttgtgtgagtccgatattagcgcaagacaatctactagagtcattgtgatttcaaggtacttcaattatttttcgaagagagcttcatatttctttatcaattgctttttgaatctccctggaaatggtagtggaggcttgtagggtggaggaacaaagactttatccttggttttagcagaggaaggctttttaacagaacgaggtaatgcatgaactagggatcgagtactacgatcgagtatgagctcctctgttgctattttagctcgtgtttcattctgaacaaaatcctccccatcttgatctacactgttcctagtgatagaggtaggggcatgtcgagttggcagctctcgatcatggcaaatagtgatggcgtgtgcagtggcatactcctttgggttctggattgcttttcttggaagttggcctgggttgttggaaactgatgttgaagcaggcttgccttccagatatctcatcctagtgctcaatgattcaaactttttgttaagatcattgaatgtggaatcgactttgttgtttaactcagccaacttcttagtgatttccatttctcctgttgcatgtccttgaattatctgcatgagcatgttcttcatatccgaatcatgaggcgaaggtgcttgatgttgttgtggtggaaaaccatgtggtggctgctgttgttgataacctctttggaattgttgctttggaacaaacccctgacattggttgtacggaaaaaacggtttgggttgttgttattgttgttgttgagggtagacttggtcttgtgggttggctacattggtacttctgtattacagattcgggttgggtctataattgttgtaccctttgttgtagccaccttggttgtgaacatacgtgatttcagcacaatgatcatcctccccctcttggacttggaatagttcatcttcacaggtgaagtgaacatgcttctgttgcacttggaggagtttgtctattatgtcattgagagctttaatctctctgtggttcttgtcattagagttagagctggtgcagatgtttctgtcgtaatcttcattataattgccatccgattgagccaagttttcaactagctctcatccttcttcaacatccttcttaaggaagttcccatttgatgcggtacaactagcatccttatcttaggctggacgtttctatagagtgtgctgagaagagaagcctacttaaatccgtgatgagggcatttggtttaataaccctttaagcgctctcaagcgtcacaaaaggtttcagttgcttttgagtgaatgaggtcattccggagtcttgcatttgtggagttggagaagaatttagccaagaaggctttcttgcagtcatcctaggttgtaattgaattttggggtaacgtcttttccaatagatgggctttatctccaagtgagaaaagaaacaagcgaagcttgaaaccatcttcaccgactccattgattttagtaaggctatagagcctttcaaactcgtctagatgatcaagcggatcctccattggcaagtcatgaaaattgttcccctgaaccattgcaatgagaccgctattgatctcaaagttgttgttctgtacgggaggaggaacaatgccatgacgctggttgtggttgtgtggaaagtaacaagcaccaatgttgttatgttgcattagctcatctacaacgtcagccattgtgtctgttgttgcctgttctgttagttggcgagcaatacggtcgatgttatcgttaaataggaggttctgattcccttgtgactgtgtatgcatgcaacaggtagcaacctgactataacagactaatcagagatgagtatgtaaagttggttgctaagtaccttaaatactaagactaaaaagacacaatgttagtatctctttttaaaaaaacgaatttgatcttaacaattctaatgatcttaaatatagctaaaagcacccaactggcaacggtgccaaattgataataggattttagtcaattattcctaaaccactaatgttgttgttgtagtattttaggtggcgatcaattcaggtgtgatgcaaatagatgagatgtgatcagaagtcactcagtcaagccaagcaataacaattttgaggtttctaacagtcccagaaaacataaattctaacagatttacaaaaatcactcgaccacaactgactggtgccaggagcaggatgtggtcgagaaacaggtcgagtatcagacagaaaataaagcaactgtacttgattgcacagtctgtcaccaaacactaggtgtggttgagtaagttggtgataacaggtaagaaatgcgaaaagtgagccacatgcaataagaacgattaaaacgatagcaatgcaacagacaaatcaaatagacgagaaatccataaggatggagtaatcaaatggagtggtatcctagcctattcagatggttaacaagtgcagtaaagctatccctagacaacaggttcaacaacagattaattcactcgcgtgatagaaatccttaagcaaagctagcccagactaattcccattaacggaatctaactatgcaagtaataagaaccgattgataaagtcaataaacgatctaaacggccaatccctttggatatatacaaatatcttaggaactagtggatcaagcattccatcaaacaccttctaggtgcgcgaatgcattggatcaaattcatgttgatcagacagaaataagcagtaagcacaactagtcctgaagcggttcaatcaattctaaaacttaactattctacagactatagatctcacaaccactctatcccatccttaagaaatctaagtcactactcaaacaacatgcttaaagccataatcgcagataaacaagtatattgcataagtaaagagataaagagtagagaaacaagaagacagatgaaatcaaatgcagaatccgaataacttggaaaaatctcaaattataggttacagaagcaaagtggtgccgccagagtaaactaggtgaacagaaataaaaaacttaagcaaaaagctgaatgtcgactagatgtctgaggacaaaaccctcaaacacctatttatacaaaacgaaataaaatgatagtagatgggccgagaacccaactgaccagccgatagagtgataatgggccaagcaggtctcgtgatcaaacgaagctccggacagcttccaaacacttcttcttcttctcttctattccttatgctcagcttgtcttgttgagtgcggatttgaagagactctgaaaatgtgatcgagtgcttggtcgagtgatgccgctgggtggtgagtgatgatactcgaccagggggtcgagtgtggtgatagagtgaatgtccgagtggtggtcaggtggtgtgaaaaagtgttactcgaccatgggtcgagtcgtgtcatcgagtggcctggagtgtggttactcgaccagggggtcgagtgattggtaagaacggcttcaatgttactcgaccagggggtcaagtgattggtaagaacggcttcaatgttacggcttcaatgtaaaatttcctcaaaattcttttcttcacacaatgaattgagtgtcaagattaagctagaagaaaatgagtgaaataaaaagtaaacaaagtaagaagacagaagattgattggttatgaaacgataaaatatagattcaggattagggtattcttaggaaactattggttagtagatctaatgatagctaggttattatcgaaccattcttaaattaaaattctaattttggaataacaggtggcgttccgggaaactctcaatgcctataactaagaataaccagagaagccgagagaaaccttagtaaataggccgattcttattacacacctgtaaaccaggttcatcaaattatagaaccaaagacagatgcctatggcgggtatatctattgtttggaatcaagttctagttaattactctacaactagcattaagaacaatttaagatgaagaattctacagatagcctagaaagggggcgatctactaaaccatatgaacccctaatgataaaccctaaccctaacaagcaaactactcagacatagaggttgaaacaagcaacatattcaagtaagaaagcataaagacatcaataaagaaaagagttaaaaaggatctcttcactgtattgaaaactgaatgaatctgtgaaaacaagggatgaatagcttatgtctctcagggaaaacttgatagaaaagaacttagatctcaacaatgacctctaaaactatatatatgacctaaaaacgtccagggactaacaatgcaaatagggaagtattatggggcaaatttaaacttctgtaaacttgtaagcgtcagggacatctctgggccgaaaccagtgtcgatcgacactcttgattggatttgaaagtgaaatcgtccttcgcttttgctccaaaatgtatcctcatctccattgttattcctcttcatagaatacctgaaaagattctagaaataataaaaagactcaaaatcctatatcaaaaacataggtaaaaaatagggttatatcaactaccggaagctcaaccatgactagaaaggaccatttccctttacctttcatcgatcaaattctcaaaaggttagccaaccatcaattttactgttccttaaatggttattcaggatttgttttagataccaacccatacggacgatcaagagaagacaacctttacttgtacctatggaacatacgcatgtagaagaatgcctttcaaactctacaatgcacctcccacctttcaatatcgtatgatgtcaatcttcacagagtattgaaaatttcatggaagtcttcatggacgatttttcggtttacggttcatcattggaatctagtttggtgaactattataatttctaaaaaatattttaactcgtaagaaaaggaaagatatagttagcaactgactccccaagacttatataacgctatcccttgagttaataagctagagaaataaaaataataattatatgatttgtaaatttggaaaaatgaagttgccacctttaccgtgtattagtgtcgatcaatacctggttggtgcgacacccatgtcgttaatatgttgctcttcgagttttgctcagaattgtttatttaaggttagtgttttcacatggatcctcaagttgaaactattaaatcactaaaccacacattaataggttcaaataagcataatgaaataggtgcaacaagtttcaaataaaataacaaaccgactcatagaagggaaaaatgactcgagaatgaaaaattaatcgaaagcaggaagcaaagatagggaagatggctaattctcatgctcggagccaaaagtgggtactggtgaacgttgacgatggcgagtaggagcaatgcaactacagcaagacaatgtagctattgcgttccaaatgcacttgaagctgtcgaccaagtactgctgaaaaatcggtggctccatagggataggcaaagtaacaggcaggtcatatggcatggctgaagaggatgacccaaaacgaagaacaccagcagggtcaatgaactcatcctctgtttgagtcgggactgatctatggatgtgcctctttgtcgcctagagcgtcgtgctgcgtgtaggagggaaagatcatgacggaaggcaactgcccgaggctcttctgtaatctcagtaagctatgtgcaaggcaactgaatcatatggttccctggaccatatctgaaacaccaaatcagactgcccttcaaccagtgagctctcttcagatatgccttatcatgtttcaccttcttagtcacaatccttactccatcaatgctaatgttgaaatgctcggaaataggagtaagaatgctaccaatccgcttaatctttttccatgttccactaaaaagcttagtctttggagataccaagtgatgcgcaaagacggttccaaagttgacatctctgtcactggcctccatctgtagactctcaaaaaaagaatctccaacagcataataaagcataagtagctcatatagcctcatcttaccaggctccatcttacacaagaaagtgttactaatgagcctagccaagtatcgcaagacaggatgacaaatctctgaatgcacataatccttagaatcatagcttccattgccaaactaggcccaaaacatctaagcatcgctaaaatgtccagggatcgagacatatgaagcatccttatcaaacccaaaaacatcacagatatctcggaaagagtatcataatcatctcaactctgagaaaaagggcgattgatatagtcacctttgttaattctcggttgatatcgtcgtcccaaacccgtctagaatgaatctgctttcctttaaatttcggccgagggaaatgagaaaccagtccctgggagcctgcatgagactgggcagacgatggtggtgcatggccgacagtggtagagcgtcgccgtgtctgtgaggaggaagaagaacctccttcgccgcttctcttttgcctcttttgctcccctaccatgttgcagatatgtgaaagtgatgcttggaatagatagagagtacaaatctattgaatttaggctctcaaatcaaagaaaatggtgaagaatcaaagattctagagagaaaatggtgaattcgctttttagaaatgaatgaagaagaagaagaaaatgttttgttttaacgcaacttacttctagaagtatggtgtcgaccgacaccatcgtgcttggtccacatcaagaaacccaaaaatgattttttctgaattgaaaaacaaataaaggttaattatccaatataaattaaactatatataactcacaagtaggttgcctcccactaatcgcttatttaaagtcattagcttgactttgcagcggtctaatcaataggtggatcctgaagatacattggatgcatctttggaagctcggtttcagcccaataatgcttgactcttcgtccattcacaggaaactttgcgccattttctccattaagaacaatggttccatatggttgaaccgaatgaagtttgtagggacctgtccaatgagaagacatttaccaggaaataaagtcatacgagagttagaaagaagtatctggtcatttgtttcaaaagatcgagatatgatcttcttgtcattataggccttggtgcgttcgttgtagagcttggaattatcataggcatgatttcatatatcatctagcttatttaactgaattagtctcctttctccggctgatttgatatcaaagttcaagatcttatcttcccaaactgctttatactctaattccactagaagatgagaagttttcccgtaacgaagatgaaaatgagtggttcctagcggagtctcgaaaactgtcctataagcccaatagtgcatcatctaacttaaaagaccactccttttttgatctaccaattgtcttttccagaatctcttttatttgcatgttcgaaacttcaacctgaccacttgtttagggatgataaggagtaggtacatgatgctgaacaccatacttgtgaagcaatttctcgagaatcatattgatgaaatggtttcccccatcatttatgataatctgaggtacttcaaaacgatggaagatgataatagtcttgtacaacatgataacaactacaaagtcattctttgggctagcgatagcttctacccatttggagacatagttaaaattgtgactagtctttagagattctgattcgaaggaggaaagggtcccatgaaatcaatgccccaacaataaaacacttcaacttctggcatctcaataagcttactaatcttttccctcctttgataagaatcacatttggatatgaacttgtgagcatcgtaggccacaaaaaaccttcttcaagaaccttagagactctcttgaaagtagcaaagtgaccgtcgttatctgagctgtgacaatggaataatatatcatgcacttctgttgtagcgacacatctcctatacataccatatgaacgaagcttgtaaaggtaaggttcatcccaagcatatcgccttatcccttgtgatgtaggtaaaattgccctaagcttattcccttaataagagatcgtcgttagtactcaagggtcgaattccacgaagttcgtttgtacacattataggcctaagtatcgaaatcaagttagatagatgataagaaaataaaagaaagcaaatagaagattatggggttgtaaaagaagataataaaaacgttaggcttagggtattttcaggaaatatgtgattagtagatctagtaattgttataatgttatcgaaccactcttaaactcaaatcactcttacagagtattattattattattttatcttatatatgtttatctgattagtaatgttatattttacaggtacattattggatagagacatatccggtttggtttcacgagtttatccaaggtcctcttgcaaggatcgactacaagaaaattgtcatttaccgactacggtgttagtcagtaattagtcgttgatttcttgtttacaactatttcacgactatccacagtagtcactaatcgagagtcggtaaatgctctagtcgtatattagtcgctatttagcgactaaaactacgactaaatgcatgtaatcgttttatagtcgtacattagttgtaaagtttgacgactattacgcgactcattaacgattaacatacgagtcttgttcctgcagttggtaaatagtcgtaacttgttacgactattttgtcactaaattggagactgagttgcgactgaagtgttatttagtcaacaattttagtaactaaaaaatgactgcttgatgacatttttggggactaaattgctactacagttgttgtcagaaaaccaatcgaatcactcaaaatagcgactacaagaatcatacacaccaattcattctcatataagaaaagtaacaaaacataaattacgaacatgtttcattcacatacaactaagaactttgttcaacacaagtacataacttttacacataaaaactttgaaaagtgacattgagttcttgagtaaggagtttagacataaacttatgaatcagatgaaatggagaggatgagagaggatctgtggttgtatatggcgaatgcgtctcgaggaaattcaggaatcggggatcagtttagcgcaagaacttatccaccaaggacaagtgctagatcttcttcttatgctcatccggaactcgggaattctcagcttcacacaaagcaaccttagtatcacccttctgattgtaagagacctgctcttctatcttgtgttgagcttccaataactgtttttgcagaccgagaaaggaagttgattcacctgcttccttccacttgcaattgacaagagactctttcaggcttcctactccataaggaacgcctcttgaatctctctcagttgactgcaaagtatgagaaaaactgagattaggaagcgctaagatcagacctaaacttaaacagagaccaacacacaactcttcaatgcatctgtgacaaccagaagaaacaattcagacaattcacacaagaaacttaaacacaaaacaacacacaactcttcaatgcctaacaaatctcattacccaacagagccattagttaaacatccgtgacaaaaacaagaaacactacatgttctcactacaacaatatatcagaccaaacatgttatcacaaacacaacatatcagacctttacttcaacattgacccaaatatcaaaacacttaagaagaagtattgggaaacagaaaacgttacttgaagaaatattgttgtacattccttagctgtgagctctcgtggccgcgaagcgccatctgaaacagttgcacattcttcagatataaggttgcaatctggtccgcctttcgatcaacatatgtcccatcaggttttgtatgtgttttgatgaaaacttcaccaacactgacaggtctgcccaattcttcttcctgtaatgaaaaaagaacaagtcatagaagcgtagagaaaagtcagactaaagttgcaaaggattaaaacagaaagtagactcaccaaatcgtctaggatttgctcatatgatttcgaccttgagaagtgtatgtgaggaacctagaccattacagtcaaacagacggtctgatgaatagatttgacttctttcttgagcttcttcagtgtcccagtatgcagtcattgtttcccatagagttttcccgatccatttaggtttctttcgactagttctcacggtgctaaccatgcctttcattcgccttaaacagatctcattgaaataatactggacagtaccagttatcaaaggatcccaatggtgtgttttctacaaaaacaaaaggtaatgtcagtaaacaaaagatgtgtaatcatatataaaagggctgaaagaaaacttaacagcaaactcgaggaagtatttctcttgtctttcttgtggcacacatgtccaactgtagaagggaccatcaaatttgtttgtaaacactctagttatcttcctaacaagtcgcgagtttgtttcccgagtaaacctccatacaaaagaaaaacaagcagttgttatttggcagaatatatatacttatcagacctaaacttaaatcagagatcaacacaacagaaccctatgatcagacctaaacttaaatcagagatcaacacaatagaaccataagatcaaaacacaacatgttcaaatgcacttaatcaaagacacgaatgcaaacacacgacttttcaaatgtatccgtgacaacaacatgaatcagaaaagacaaatacttaaactacttggcctcacaaagctcattacccaacataaccataagatcaaaccacaacatgttctcacaaaaaagagacatataatttcataccaacaaatcaaatctagcaaaaggctgcaagtatcatctaaatatgacaactaaacttaagttaagacaatgcaaacacacgactcttcaaatgcagccatgacaaaaacatgaatcaattcagacaatacttaaactacttggcctcacaaagctcattacccaacagaaccataagattaaaacacaacatgttctcgcaaacaacagacatagaatttcataccaacatatcaaatctagcaaaaggctgcaagtatcatctaaatatgacaactaaacttaaacaaagacaatgcaaacacacgactcttctagatttgtccgtgataaaaacatgaatcaattcagacaaatactacttggcctcaccaacccaatatcacaactaaacctaagatcaaaacacaacacaacatgtgctcacaaataacagaagaagaagatcataccattctatattcgttagaggcaagggagagaggacggtgaccaacttatctctgtccgacaatatcggcaggtcatttagagactgaagtgtgtcctcctggagatccggcgacagaggagcatcagcatcaaagttattgccttgagaggataggtgattgtgaacccgagactcttgaactggagaaggcggagggtcttgctgaggagttggaggaaccggctgaggagttggagggacaagctgaggagtcggagtggctagctgaggagtcgacgtggcttgattctggacttctacggaagaagtcctttgtagttgaggttgctgaatcacggagtgctggaataactgttgaggcggagggtagttccggacatgagctgtcgttgactgtacttgaggaacggaggctggtctttcaggactctgaagcagagggttacgttgagctgctggcgtaaagtcgtactgagccggaagagtactcggtcgtccagcaaccgtggatccggtggcttgatgagcaagtttaggagtggttcgccgcttttttcctcgcccaaacatcgtttgacggagagaaaaatgctggagactgagagagtttgtaagtatgaaatcgaagaaagattgagagtgtgaaatcaaagagagattgtgagtttgattttgaaaatacaatgtgagtttgaatcgaaatggttggaggaatcaaagagaagaaagatcgaaaaggatgaatcaaagagaggaagagagatcgaagagagattgctagggtttcgaagtcagctgcgggaagaaaaaaacccttaaaagggtagggtttagaattgttgaagtagggtatgggcctcgcgttcgggccagaattttgagttttagtcgcgactttgtttgggcctcaagttgttggcccaataagtttgatattagtcgcaaaactgtaactagatattaattcttttaattgtgtttgggcctcgagtttttgggcccaataagtttgtaattagtcgcaaaagtgtcagtaaatagtcactaatgttaaattcttgtaattgggtttgggccgcgagattttaggctaataaatttgttattagtcataaaaatgtcagtaaatagtcactaaatttaaattcttctaattgggtttgggcttaactgtttgtgggaaaagttaaatgttaaatgttaatattaattataattatacttacaatataattaattatagtaaatatacttagtcaaatctaatatttttttatttagtcaaattaatttaaattttttgcataattatatataattaaaatcatattatacaataatataacttaatttgatatcaatatattacaaaaacataatattgttctacgtcttcttgttcgtcatcatcagaagacgataaattacataggaatcgatcttctgtatcggtgtctccgagatcgtaatcaagatttattgggtatcaatcttctgtcaaattgtcgagtacaagatcttctattgtagtcattaaaacagcatcatcattttctgtttgcaatagagtctcgtctttcttttcatattcttctaatatgtttccccttggatttacttttaaaacgttgagccacttccgctttgatttcttcgtgtatagataaggtataaaacagacttgttccctttgagatgttgtttgtaaatgcaccatgtttggataattacataattgtatatgatcaagaaaaactaaatgaccatatatatatagtgtatgtacctaaaataaatggctcgtatttgttgtatcttctcgatgaaagaacatcgacaacaccactattcctcctccgagtgcctcttctaagcttagggtcataccacgaacatttaaaaagtgttatttttaaactgaccaccccctcatattcaagttctatgatatcatttaagttttcgtaaaaatctgcggcgtcagatgcatccgcaaaattttcacctttcacacataaaccatagttacaagtcttacgtccagttccatgactctgtgtatgaaacaaatagccttttgtaaaatacattggccaggttttgactttgtgcaaaggtccatgtactatctcttgaacccaagatggaaatggattactcgtgttccaatatgtaacctgtatgcaaatttagaaataaacatcattatagatatgaagaataataaataaatgcaaatcatatatagataaattatttagacatacataatctttcacccacacatgatattcttcacctcttttcacgtagagttctttttcgttcaatcatggatatttaatagaaagaaaatctttgaatatactatacaaaaacaacaaatagggcttattaaccaacatatatatgagaattagttatgtgcgtagaatttataattaaaaacttaaaatgggagtatttaatttgttatatacctctcaattacttgaaaataataacaatttcgtaaaacatatccatgtgcgcattcatagtcttcctctaatcgacgtgagtaaatatattaggtactacatgaacataatatacaggaacttcaccctcattgaatctcgtgaacctgatccaaatgaggtaattcatggttattaacttgaaaaattgcttttgtaaagatgtttaattactatatatttaattaccttgattttgattgtatattatcggcaaagtagtactctgagaaataagaattc

SEQ ID NO: 1471 - DNA, 105743 bp, Arabidopsis thaliana
gaattcctcctaagtgagcttgtttaaagtctctaacttgactcctcacactcattaagaagaaaatgggtgatagagaggatctgcatagtcctctctgatctcatcatcatattcagcatcctctcttgagagatgagtagcagaatactcaattcttctttcctcgaaataggcctctttctcttctggtggataatctaactcctcagaccatcttgaagtaaacttttttctcgggatagtatcaatcccgcattttgattgagctttctcttgcatctgatccagtttactcttaagttcctcaactgtctgagctagcttctctatggtttcttcttgctcatcagatttctttttgagatctcacaagtcaggtgtagaggttgtgcttggtctggtgattgaattcgaaggttgaggttgagccctgatcttttctcttacagctgtcctttgcgaagtttcgttgatatcaaactgtagcttgatgtgcttcccaaggttaagacttattctcccgtctttgacatctatcattgctcccactgacgctaagaaaggtctccctaggattagaggatccttaggttctacttccatctcaagcacaacgaaatctataggtacttccactccataaatcattactggcagatcttttagcaagccgaagggttttcttgaagacctatcagcaaggatcaaagtcaggtcgcaaggcctgtactgagtgaattccagcttccttgccacggagagtggcattaaggttactgaagctcccaaatcacatagacaattgttgaaaaccaattgaccaatggaacatggtaaagtgaaagttccaggatcttccagtttttcgtgaacactcctcttaacagtggccctagacggattagcatcacattcgtcttttgaatcttgataaatcttgatcctttccagaattgaatttctcacatctttgtgaggatccgagatcaggttgagaacttctattagaggcatcaccgcttccatctcatcaagctgcttttctacaagagaattttatctttctatccatgctttcctgaatttccatggaagagcacgtgaaggtaatggtgctggcttgaatctttttaccatcctctcaatgatggctgctttctcgtcaaggttggaccgagtttaaaaacgggatcctgctgaattgtcgagtccaacaactgaaatttcaatttgagtagaagcctccccttcctgaacatcactgttctcagtgattaagttggagacatgtcgagtaggtagctctcgatcatgacagatggtgatagcgtgagcggtggcgtattccttcgggttctgtatggacttccctggaagtcctgttactttgggagtagaggtcgatgcagattgtccttccatgtatctgaccttacaagtaagtgcctcaagtttgatgttcagatcgttgaaagtgcaatcaaccttcttgtggatttctgccatcttttttgcgagatccattgctcctgctgcttgtccctggagaatctgctgtaacatgttcttcaagtctgaatctggagttgttgaaactggtagttgttgctgctgtgtgaacccaggtggtggaagttgctgcggatagttgccctgatactgctgcttaggaacatacgcctgaccttggttgtatggaacaaagggcttgggttgattctgctgctgtgaagggtagacttggtcctgcgggtttgcaacatttgtacttttgtaagacagattgggatggttctgcttgaagttgttgaaacctttgttgtaacctccttggttttgcacatagctgacctcttctgactgtagagtttccccatcctgaacttggaacgtctcatcatcacccaggaaatgaatgtgcttctgttgcacaaggagtagcttgtccagtttgtcattcatggctttcatttccctgcggtgcttctcatcagaatcagagctgtggcggatgcttctatcgtaatcttcattgtagttgccatccgactgtgccaagttctctaccagctcccatccttcttcaacgtctttgttgaggaagttcctgttagaagcggtatcaagaagcatcctgatcttcggaaggacacctctgtagagagtgctgagaagtgaagctttggagaaaccatgatgaggacattgcgtctgataacctttgaagcgctcccatgcttcacaaaaggtctcattatttgtctgtgtgaaacctaaaatatcattccttagtctcgcagtcctggagtttgagaaaaacatagttaagaaggctttcttgcagtcattccaggaggtgatagagccttgaggaagcgacttttcccactgatgggctttgtctccaagagagaatagaaaaaatttgagcttaaagccatcctcactaactccattgatctttgttaggctgcagagcctatcaaactcgtccaagtgatcgagtggatcctccatagagaggtcatggaacttgttgctctgaaccatggcaatgagaccgctcttgatctcaaagttgttgttctgcactggtggaggcacgatgccaatacgctgattgtggttgcgtggtgcatcgcctgcaccgatgttgtttggctgcacttgctcatctacaactgcagccattgtgtctgtttctgtctgtgttctgagttggcgtgcaatacggtcgatgttatcattgaataggagattctgatttccttgtgaccgtgtttgcatacaacgagtaccaactggtgaagctggtgattcgcagtacctgaatcaaaacagacaaacagaaaaaatacatagttggtaactttcagtaaaaatgaaaaagaacttgatcttaaatattctgaaatctcaaatatagcaaacaaacacccaattggcaatgacgccaaattgataataggtttttaagtcaattaatcctaaagcactatcatgtcgttgtagtacttagggtgtcaatccaaatgggagtgatgcaaacagatgagatgtgatcagaagtcactaagtcaagccaagcaataacagttttggggtttctaacaatcctaagcgaacatgcagaaaacagaaacaataacagaattactaaaatcactcgaccacaataggctgatgccagaagtaggatgtggtcgagtaacagacaggatatgaaacagatatactcgactgcacagtttgttgccagacactgggtgtggtcgagtatactggtcgagtaacaaacaggaaatgagacaactatactcgactgcacagtctgttgccagacactaggtgtggtcgagtaagttgatcgagtaatcgcaaaaactaagaactagacaataagaacgattaagtgataacgataaaatagagaaatcagatagaagagaaattcataaggatggggtaatcgaatagagtggtatcctagcctattcgaatggttaacaagcgcaatcaagctatccctagacaacaggttcaacaacagattaattcactcccgtgatagaaatcctcaagcaaagctagcccagactaattcccattaacgaaatctaactatgaaggcaataagaacagactgataaagtcaataaacgctctaaacggccaatcccttgggatatagacgaatatctcgaattaaagatgaaatcaaatgcggaatctgaataacttggaaaaatctcgaattacaggttgcagaagcaaacgtggcgctcgtagggctcgaagtaaagatcatcctcaaccttcacctggggaaacaagggttcagacacatctcgccaattcgatgttccagcctcgttagcagttgggacatgaggccttcgaacaagagatggctcaggatcctctcgaagatcgagttcccgagatatatcagcggaagtatcttcttgagccatgaaagggctcggctcttcgggcgtattagatgatgaagtcgcatcaccctggtgactcgaactcggttcggcatcttccgacgagctccaaaccatcctccttttatggatcggagggagatcgtctcggtgcacggagttttgacaaagcaaaagccgtaaccagaaatttctaaccaggaaaatcaaaacaaacctaaaagacgacggaggttcaccggaaatatagaagaatataaagaaatcaagattagaggagagaaagaaaacctcgaaactttttccttcggaacttcaaatgaaattcttaaagaatgctttattatttatagaacttttagggtgcgttgggttcggaggaaatcacgaaccgcgtcgttggcgcgtggcctcgtcaaaatacgggacacccgcgtgaacctcgggaattagcgaagacatttccccttctcgagagaaaagagcggctacacgcaaagaagtttgaccgtcccggaagttgaagcgtcaaaagctgcgggataggaaaacgatcggccagctcggtcaccgtactcatacagctcgttgtttctcgcaataaaaataacgaggtgggggcaaactgttggggtcggatttccccagaagaccgagccaaacaaaaaggcttcgggagctcagcctactacaaacagtagggaaactattcacaggacgctactcgctcgggtatccgtacccggttcggttgtcattccaggaaacatacccgagccgggaaaggaaacacttgggattccgagatgaaactaccatgcggcttggttgttattccaataaacacacccgagcagagaatggacgtctagaggatcatttagggtcgtctaggaggacttctggtcgcgtagaatatgcaccgagctgattcctagcgtttcatagtagcctgaggcaaagactttgcacatcttaccaaaacgatccaaagaccatttccgaagaatccagatatgataatgaagaatcttcgagggtatagccgaatgaagaaatttcggttatgtgagtttcgactctcacagtgtcctaatgcgaggtagctccaacttccatcggagagccacatggcagttgatgtgacggagtttgctgatctacttccgcttgtgagttttggacactcgtactaacggttccctgaaagtcgagctgtgcttagactcctgcggtacacagcgttcctgtagagagagtgtcaactcgatctacatacgcgttgtgagcttccctgatttcggaatgactggtggtgagcgctgcgagctggccactgcattcttcttttcggacaaagacgtttcggtggactgctgccgctctgttttgtcggaaagctccttaagcagcttcttgatatcagcaagggtggaggcatggtcgccggagttctggtcgtcggtgttactcatggtagactgatcgttgctctgaagtaaaacacttaaaccacccttcttctagcgccaaattatggatgtcagaatccgcaattagaatttcgtggttgtatttcaaagatctttaaacttgttagtcgaacaacaatcagctgaaatgtttcagtatatttcagtattcttttagtaccattttcggtttttcctagtaaatgacaatagttctctatttatacaattacaacgaatcttgcgaactaaatgtccagctgatatcgcttcactaactccgtacgttatgaacatccagctcagtccgcagatcccgcttcagcgtatgttacgaatcttcaggtaatcaatgcgtgttattaactcagaatcttttcgttaacgaagcaatataaaacggtttctagataactggcctagtgatgggcttttccgcttggtcgggcctttctcaaagccctacacactccaaatgtctcaccaaattgcgggtttggttagcaccagatccgacatccacaatccctttaaaattcattagttctagaacgtgaatcaagcaatgcatcatcaatgaactcatttggctaaggtgaaggtcaagagacaaagatggtcccttaaagaataggttttagtaaaatgagatctctcaagaatgattgagctttagtataatgctaaaggtaagtccctaattatgcatacagagataagatcccatctacccaaagtataacaaatgaagctctaatggtaatcccatctccaatcccaaaataataacttaactctaccctttgcattcatgaatcttttaaaccctttttcagatcattcttttcttttctcttaactctaagagaagctttctcaacactttgatacttctaacggatttggatttcttgtaaaaactaaggttcatggttttaatctttaaaactaagggctttttacccttcttctttagctgacaagaacctcattcttttttttgacattcccaaaacctttactagactttttctaacttttttagcttacttcccctagaattcctttccctttccttatcaacaatgaattcactattttctttcttttagaaacatcccaacccacgatataagcgcccacctagtcctatctagtctggataacgtaaattagaactacatgaaacactatctctttcgttacgaacctaacactttctaccaagctcaatcggaataagacctcacagacactcacaagtgataaaggcttgaaagaaggtttaggcttaaggttggggttaactgctccaataaggggagtcagctacttggacaaacaagagtcctgtaaggaagtccaagtattttagggtatccatgagtttaaattcgatgttaagacatgataattttaaatcagattcaggttcgaattgatagagaatggtatcaaatcttcacagtgtggtcgagtagagcattttaggcatggtgcagttctacttcaatttcattgactatgcatcatacaactaacaacgagggcactgagtttatcgggtgaaccaaaatgcttacaagactatctcatcattattccctatgcaatgtgaatgcaacaatcctatatgaaacatcctagactcaaccctaaatgtgatgcaactacatgaacaatctctttttgtgaaatcattttcaaaaaattttaaaattttgttttgttttttttatgccttatatgaatgcagactcaagaatatatacaacaccacacacacttcgtgagccctctcccaatattaaatcacacagtcctctgtgtgaccaaatttggaagagagtactccaggcaaaacacatcacagaaacaaaaacaagagatgttattatacaatggttaagtgaggtgcttacctcagttgaagaaggaacgcagttgatcgtcgatggctgtctgcgattgctgctaggccattgaagaatctccatgttgtgtctcagctccgccatgtaggtacttaacctcatctcctctattgcggcaagcaccgcctcctgaatactcgacctctctttttctgctgcggccagcgccgcctcatgaatactcgatgataataggattttaagatcaattacacataaaacactatcctgtcgttgtagtattttaggttgttaatccaaatgggtgtgatgctagcaatcaagatgcaatcagagttcaaaaagtcaagccaagcaattacaggttttgagtttctaggagtccttagtgaatatggaggaaacagaaattcaagcagacacagttaaaacactcgaccaacacaacttgttgccaagcactgggtgtggtcgagtgacaggttgagtaacagacagaaaatgtaacaggaatactagactgcacagtctgtcaccagacaacagggtggttgagtatctgagtgataacatgcaagaaatgtaaaaattaagcaataggtaacaagaaacagtaaacgatagcaatgtaaataaagaaatcaattggatgagaaaattctcgaggatggggtaatcgagtagttagtttcctcaatctacaggtgactgacatgctcaataaactatccctagacaacaagttcgataaccaaatctaagtgccaccgcaacagagaccctcaagttaaactagtcccagactcaatcaccattgacgagagctaacctaacaagcattacaaatcaacaagttaaagccaaaacgctccctgtaaccaataccttaggagagagccacgagtctctctaattagtggttcagacatttcgtcgaacactcttttgggtgcgaaaatgtatgggctcaaattctagttgatcagaaaccaataggcattaagaacaactaatctagaagagatctataaatcaaactcaaccacctaacagactaaggattctaaactactctaacccatcctcagaaagctagtcactactcagacttcattgcagaaaacaaaaacgatgacatgaatgaaaacatcatagcaacagaatgataagagaacgataacaggatgatgaacttagtaatgaaaagtgaaatactgggacttcctcccaagtgagcttgttttaattctctagcttgactcctcacactcattaggcttaaggagggtgaatgagaggaattgaaatcttctcttcttccttagtagatacaacatcgtacttagcatgctctcttgacaggtctgtaattaagtactctatggccatttcgttgtaagcttctttttcttctaatgggtagtcttcttcttcaaaccattctgaagcaaacttcttccttgggatagcttcaatgctaagttgaggttaaatagcgtcctctgcatccgacgcactttatccctaagttcctcaacaatgtaagttagcttcttgatggtttcttcttggagatcagacttccttttgagttctccccaatcaactacatagagcgtactagattgagttgttgagtttaaaggtcgtgttcgagctaaactttgtttctttactctgtaagtctcaaatccttcttttgtaaccactccttggaccccaaatgtatgtccctctatggttgatcttcttggagttttgttgatgtcaaactgtaaccttatatgcttccaattttttacgtctatcacctctcctcctaaggccaagaaaggtcttcctaggatcagaggatctttaggttcttcatccatctcaagcacaacaaagtctgtaggcacttctactacattaatcttgataggcatatcttctaataggccataaggttttcttaaggttctatgtgcaaggatcaaggataagtcgcacggcttatacttgagaaatcccagcttccttgccatcgaaagtggcattaggctgactgaagctcctagatcacatagacagtttctcaaagcaagttgcctactagagcatggtagagtgaaagatcctggatcttccaacttttcctgaacaatgttcttcaggatgattgcactgcactcgtgagttaacgccaccattccttgaacttctatgatcctctttgaaatcatgtccttcacacagttgtgtgagtccgatattagcgcaagacaatctactagagtcattgtgatttcaaggtacttcaattatttttcgaagagagcttcatatttctttatcaattgctttttgaatctccctggaaatggtagtggaggcttgtagggtggaggaacaaagactttatccttggttttagcagaggaaggctttttaacagaacgaggtaatgcatgaactagggatcgagtactacgatcgagtatgagctcctctgttgctattttagctcgtgtttcattctgaacaaaatcctccccatcttgatctacactgttcctagtgatagaggtaggggcatgtcgagttggcagctctcgatcatggcaaatagtgatggcgtgtgcagtggcatactcctttgggttctggattgcttttcttggaagttggcctgggttgttggaaactgatgttgaagcaggcttgccttccagatatctcatcctagtgctcaatgattcaaactttttgttaagatcattgaatgtggaatcgactttgttgtttaactcagccaacttcttagtgatttccatttctcctgttgcatgtccttgaattatctgcatgagcatgttcttcatatccgaatcatgaggcgaaggtgcttgatgttgttgtggtggaaaaccatgtggtggctgctgttgttgataacctctttggaattgttgctttggaacaaacccctgacattggttgtacggaaaaaacggtttgggttgttgttattgttgttgttgagggtagacttggtcttgtgggttggctacattggtacttctgtattacagattcgggttgggtctataattgttgtaccctttgttgtagccaccttggttgtgaacatacgtgatttcagcacaatgatcatcctccccctcttggacttggaatagttcatcttcacaggtgaagtgaacatgcttctgttgcacttggaggagtttgtctattatgtcattgagagctttaatctctctgtggttcttgtcattagagttagagctggtgcagatgtttctgtcgtaatcttcattataattgccatccgattgagccaagttttcaactagctctcatccttcttcaacatccttcttaaggaagttcccatttgatgcggtacaactagcatccttatcttaggctggacgtttctatagagtgtgctgagaagagaagcctacttaaatccgtgatgagggcatttggtttaataaccctttaagcgctctcaagcgtcacaaaaggtttcagttgcttttgagtgaatgaggtcattccggagtcttgcatttgtggagttggagaagaatttagccaagaaggctttcttgcagtcatcctaggttgtaattgaattttggggtaacgtcttttccaatagatgggctttatctccaagtgagaaaagaaacaagcgaagcttgaaaccatcttcaccgactccattgattttagtaaggctatagagcctttcaaactcgtctagatgatcaagcggatcctccattggcaagtcatgaaaattgttcccctgaaccattgcaatgagaccgctattgatctcaaagttgttgttctgtacgggaggaggaacaatgccatgacgctggttgtggttgtgtggaaagtaacaagcaccaatgttgttatgttgcattagctcatctacaacgtcagccattgtgtctgttgttgcctgttctgttagttggcgagcaatacggtcgatgttatcgttaaataggaggttctgattcccttgtgactgtgtatgcatgcaacaggtagcaacctgactataacagactaatcagagatgagtatgtaaagttggttgctaagtaccttaaatactaagactaaaaagacacaatgttagtatctctttttaaaaaaacgaatttgatcttaacaattctaatgatcttaaatatagctaaaagcacccaactggcaacggtgccaaattgataataggattttagtcaattattcctaaaccactaatgttgttgttgtagtattttaggtggcgatcaattcaggtgtgatgcaaatagatgagatgtgatcagaagtcactcagtcaagccaagcaataacaattttgaggtttctaacagtcccagaaaacataaattctaacagatttacaaaaatcactcgaccacaactgactggtgccaggagcaggatgtggtcgagaaacaggtcgagtatcagacagaaaataaagcaactgtacttgattgcacagtctgtcaccaaacactaggtgtggttgagtaagttggtgataacaggtaagaaatgcgaaaagtgagccacatgcaataagaacgattaaaacgatagcaatgcaacagacaaatcaaatagacgagaaatccataaggatggagtaatcaaatggagtggtatcctagcctattcagatggttaacaagtgcagtaaagctatccctagacaacaggttcaacaacagattaattcactcgcgtgatagaaatccttaagcaaagctagcccagactaattcccattaacggaatctaactatgcaagtaataagaaccgattgataaagtcaataaacgatctaaacggccaatccctttggatatatacaaatatcttaggaactagtggatcaagcattccatcaaacaccttctaggtgcgcgaatgcattggatcaaattcatgttgatcagacagaaataagcagtaagcacaactagtcctgaagcggttcaatcaattctaaaacttaactattctacagactatagatctcacaaccactctatcccatccttaagaaatctaagtcactactcaaacaacatgcttaaagccataatcgcagataaacaagtatattgcataagtaaagagataaagagtagagaaacaagaagacagatgaaatcaaatgcagaatccgaataacttggaaaaatctcaaattataggttacagaagcaaagtggtgccgccagagtaaactaggtgaacagaaataaaaaacttaagcaaaaagctgaatgtcgactagatgtctgaggacaaaaccctcaaacacctatttatacaaaacgaaataaaatgatagtagatgggccgagaacccaactgaccagccgatagagtgataatgggccaagcaggtctcgtgatcaaacgaagctccggacagcttccaaacacttcttcttcttctcttctattccttatgctcagcttgtcttgttgagtgcggatttgaagagactctgaaaatgtgatcgagtgcttggtcgagtgatgccgctgggtggtgagtgatgatactcgaccagggggtcgagtgtggtgatagagtgaatgtccgagtggtggtcaggtggtgtgaaaaagtgttactcgaccatgggtcgagtcgtgtcatcgagtggcctggagtgtggttactcgaccagggggtcgagtgattggtaagaacggcttcaatgttactcgaccagggggtcaagtgattggtaagaacggcttcaatgttacggcttcaatgtaaaatttcctcaaaattcttttcttcacacaatgaattgagtgtcaagattaagctagaagaaaatgagtgaaataaaaagtaaacaaagtaagaagacagaagattgattggttatgaaacgataaaatatagattcaggattagggtattcttaggaaactattggttagtagatctaatgatagctaggttattatcgaaccattcttaaattaaaattctaattttggaataacaggtggcgttccgggaaactctcaatgcctataactaagaataaccagagaagccgagagaaaccttagtaaataggccgattcttattacacacctgtaaaccaggttcatcaaattatagaaccaaagacagatgcctatggcgggtatatctattgtttggaatcaagttctagttaattactctacaactagcattaagaacaatttaagatgaagaattctacagatagcctagaaagggggcgatctactaaaccatatgaacccctaatgataaaccctaaccctaacaagcaaactactcagacatagaggttgaaacaagcaacatattcaagtaagaaagcataaagacatcaataaagaaaagagttaaaaaggatctcttcactgtattgaaaactgaatgaatctgtgaaaacaagggatgaatagcttatgtctctcagggaaaacttgatagaaaagaacttagatctcaacaatgacctctaaaactatatatatgacctaaaaacgtccagggactaacaatgcaaatagggaagtattatggggcaaatttaaacttctgtaaacttgtaagcgtcagggacatctctgggccgaaaccagtgtcgatcgacactcttgattggatttgaaagtgaaatcgtccttcgcttttgctccaaaatgtatcctcatctccattgttattcctcttcatagaatacctgaaaagattctagaaataataaaaagactcaaaatcctatatcaaaaacataggtaaaaaatagggttatatcaactaccggaagctcaaccatgactagaaaggaccatttccctttacctttcatcgatcaaattctcaaaaggttagccaaccatcaattttactgttccttaaatggttattcaggatttgttttagataccaacccatacggacgatcaagagaagacaacctttacttgtacctatggaacatacgcatgtagaagaatgcctttcaaactctacaatgcacctcccacctttcaatatcgtatgatgtcaatcttcacagagtattgaaaatttcatggaagtcttcatggacgatttttcggtttacggttcatcattggaatctagtttggtgaactattataatttctaaaaaatattttaactcgtaagaaaaggaaagatatagttagcaactgactccccaagacttatataacgctatcccttgagttaataagctagagaaataaaaataataattatatgatttgtaaatttggaaaaatgaagttgccacctttaccgtgtattagtgtcgatcaatacctggttggtgcgacacccatgtcgttaatatgttgctcttcgagttttgctcagaattgtttatttaaggttagtgttttcacatggatcctcaagttgaaactattaaatcactaaaccacacattaataggttcaaataagcataatgaaataggtgcaacaagtttcaaataaaataacaaaccgactcatagaagggaaaaatgactcgagaatgaaaaattaatcgaaagcaggaagcaaagatagggaagatggctaattctcatgctcggagccaaaagtgggtactggtgaacgttgacgatggcgagtaggagcaatgcaactacagcaagacaatgtagctattgcgttccaaatgcacttgaagctgtcgaccaagtactgctgaaaaatcggtggctccatagggataggcaaagtaacaggcaggtcatatggcatggctgaagaggatgacccaaaacgaagaacaccagcagggtcaatgaactcatcctctgtttgagtcgggactgatctatggatgtgcctctttgtcgcctagagcgtcgtgctgcgtgtaggagggaaagatcatgacggaaggcaactgcccgaggctcttctgtaatctcagtaagctatgtgcaaggcaactgaatcatatggttccctggaccatatctgaaacaccaaatcagactgcccttcaaccagtgagctctcttcagatatgccttatcatgtttcaccttcttagtcacaatccttactccatcaatgctaatgttgaaatgctcggaaataggagtaagaatgctaccaatccgcttaatctttttccatgttccactaaaaagcttagtctttggagataccaagtgatgcgcaaagacggttccaaagttgacatctctgtcactggcctccatctgtagactctcaaaaaaagaatctccaacagcataataaagcataagtagctcatatagcctcatcttaccaggctccatcttacacaagaaagtgttactaatgagcctagccaagtatcgcaagacaggatgacaaatctctgaatgcacataatccttagaatcatagcttccattgccaaactaggcccaaaacatctaagcatcgctaaaatgtccagggatcgagacatatgaagcatccttatcaaacccaaaaacatcacagatatctcggaaagagtatcataatcatctcaactctgagaaaaagggcgattgatatagtcacctttgttaattctcggttgatatcgtcgtcccaaacccgtctagaatgaatctgctttcctttaaatttcggccgagggaaatgagaaaccagtccctgggagcctgcatgagactgggcagacgatggtggtgcatggccgacagtggtagagcgtcgccgtgtctgtgaggaggaagaagaacctccttcgccgcttctcttttgcctcttttgctcccctaccatgttgcagatatgtgaaagtgatgcttggaatagatagagagtacaaatctattgaatttaggctctcaaatcaaagaaaatggtgaagaatcaaagattctagagagaaaatggtgaattcgctttttagaaatgaatgaagaagaagaagaaaatgttttgttttaacgcaacttacttctagaagtatggtgtcgaccgacaccatcgtgcttggtccacatcaagaaacccaaaaatgattttttctgaattgaaaaacaaataaaggttaattatccaatataaattaaactatatataactcacaagtaggttgcctcccactaatcgcttatttaaagtcattagcttgactttgcagcggtctaatcaataggtggatcctgaagatacattggatgcatctttggaagctcggtttcagcccaataatgcttgactcttcgtccattcacaggaaactttgcgccattttctccattaagaacaatggttccatatggttgaaccgaatgaagtttgtagggacctgtccaatgagaagacatttaccaggaaataaagtcatacgagagttagaaagaagtatctggtcatttgtttcaaaagatcgagatatgatcttcttgtcattataggccttggtgcgttcgttgtagagcttggaattatcataggcatgatttcatatatcatctagcttatttaactgaattagtctcctttctccggctgatttgatatcaaagttcaagatcttatcttcccaaactgctttatactctaattccactagaagatgagaagttttcccgtaacgaagatgaaaatgagtggttcctagcggagtctcgaaaactgtcctataagcccaatagtgcatcatctaacttaaaagaccactccttttttgatctaccaattgtcttttccagaatctcttttatttgcatgttcgaaacttcaacctgaccacttgtttagggatgataaggagtaggtacatgatgctgaacaccatacttgtgaagcaatttctcgagaatcatattgatgaaatggtttcccccatcatttatgataatctgaggtacttcaaaacgatggaagatgataatagtcttgtacaacatgataacaactacaaagtcattctttgggctagcgatagcttctacccatttggagacatagttaaaattgtgactagtctttagagattctgattcgaaggaggaaagggtcccatgaaatcaatgccccaacaataaaacacttcaacttctggcatctcaataagcttactaatcttttccctcctttgataagaatcacatttggatatgaacttgtgagcatcgtaggccacaaaaaaccttcttcaagaaccttagagactctcttgaaagtagcaaagtgaccgtcgttatctgagctgtgacaatggaataatatatcatgcacttctgttgtagcgacacatctcctatacataccatatgaacgaagcttgtaaaggtaaggttcatcccaagcatatcgccttatcccttgtgatgtaggtaaaattgccctaagcttattcccttaataagagatcgtcgttagtactcaagggtcgaattccacgaagttcgtttgtacacattataggcctaagtatcgaaatcaagttagatagatgataagaaaataaaagaaagcaaatagaagattatggggttgtaaaagaagataataaaaacgttaggcttagggtattttcaggaaatatgtgattagtagatctagtaattgttataatgttatcgaaccactcttaaactcaaatcactcttacagagtattattattattattttatcttatatatgtttatctgattagtaatgttatattttacaggtacattattggatagagacatatccggtttggtttcacgagtttatccaaggtcctcttgcaaggatcgactacaagaaaattgtcatttaccgactacggtgttagtcagtaattagtcgttgatttcttgtttacaactatttcacgactatccacagtagtcactaatcgagagtcggtaaatgctctagtcgtatattagtcgctatttagcgactaaaactacgactaaatgcatgtaatcgttttatagtcgtacattagttgtaaagtttgacgactattacgcgactcattaacgattaacatacgagtcttgttcctgcagttggtaaatagtcgtaacttgttacgactattttgtcactaaattggagactgagttgcgactgaagtgttatttagtcaacaattttagtaactaaaaaatgactgcttgatgacatttttggggactaaattgctactacagttgttgtcagaaaaccaatcgaatcactcaaaatagcgactacaagaatcatacacaccaattcattctcatataagaaaagtaacaaaacataaattacgaacatgtttcattcacatacaactaagaactttgttcaacacaagtacataacttttacacataaaaactttgaaaagtgacattgagttcttgagtaaggagtttagacataaacttatgaatcagatgaaatggagaggatgagagaggatctgtggttgtatatggcgaatgcgtctcgaggaaattcaggaatcggggatcagtttagcgcaagaacttatccaccaaggacaagtgctagatcttcttcttatgctcatccggaactcgggaattctcagcttcacacaaagcaaccttagtatcacccttctgattgtaagagacctgctcttctatcttgtgttgagcttccaataactgtttttgcagaccgagaaaggaagttgattcacctgcttccttccacttgcaattgacaagagactctttcaggcttcctactccataaggaacgcctcttgaatctctctcagttgactgcaaagtatgagaaaaactgagattaggaagcgctaagatcagacctaaacttaaacagagaccaacacacaactcttcaatgcatctgtgacaaccagaagaaacaattcagacaattcacacaagaaacttaaacacaaaacaacacacaactcttcaatgcctaacaaatctcattacccaacagagccattagttaaacatccgtgacaaaaacaagaaacactacatgttctcactacaacaatatatcagaccaaacatgttatcacaaacacaacatatcagacctttacttcaacattgacccaaatatcaaaacacttaagaagaagtattgggaaacagaaaacgttacttgaagaaatattgttgtacattccttagctgtgagctctcgtggccgcgaagcgccatctgaaacagttgcacattcttcagatataaggttgcaatctggtccgcctttcgatcaacatatgtcccatcaggttttgtatgtgttttgatgaaaacttcaccaacactgacaggtctgcccaattcttcttcctgtaatgaaaaaagaacaagtcatagaagcgtagagaaaagtcagactaaagttgcaaaggattaaaacagaaagtagactcaccaaatcgtctaggatttgctcatatgatttcgaccttgagaagtgtatgtgaggaacctagaccattacagtcaaacagacggtctgatgaatagatttgacttctttcttgagcttcttcagtgtcccagtatgcagtcattgtttcccatagagttttcccgatccatttaggtttctttcgactagttctcacggtgctaaccatgcctttcattcgccttaaacagatctcattgaaataatactggacagtaccagttatcaaaggatcccaatggtgtgttttctacaaaaacaaaaggtaatgtcagtaaacaaaagatgtgtaatcatatataaaagggctgaaagaaaacttaacagcaaactcgaggaagtatttctcttgtctttcttgtggcacacatgtccaactgtagaagggaccatcaaatttgtttgtaaacactctagttatcttcctaacaagtcgcgagtttgtttcccgagtaaacctccatacaaaagaaaaacaagcagttgttatttggcagaatatatatacttatcagacctaaacttaaatcagagatcaacacaacagaaccctatgatcagacctaaacttaaatcagagatcaacacaatagaaccataagatcaaaacacaacatgttcaaatgcacttaatcaaagacacgaatgcaaacacacgacttttcaaatgtatccgtgacaacaacatgaatcagaaaagacaaatacttaaactacttggcctcacaaagctcattacccaacataaccataagatcaaaccacaacatgttctcacaaaaaagagacatataatttcataccaacaaatcaaatctagcaaaaggctgcaagtatcatctaaatatgacaactaaacttaagttaagacaatgcaaacacacgactcttcaaatgcagccatgacaaaaacatgaatcaattcagacaatacttaaactacttggcctcacaaagctcattacccaacagaaccataagattaaaacacaacatgttctcgcaaacaacagacatagaatttcataccaacatatcaaatctagcaaaaggctgcaagtatcatctaaatatgacaactaaacttaaacaaagacaatgcaaacacacgactcttctagatttgtccgtgataaaaacatgaatcaattcagacaaatactacttggcctcaccaacccaatatcacaactaaacctaagatcaaaacacaacacaacatgtgctcacaaataacagaagaagaagatcataccattctatattcgttagaggcaagggagagaggacggtgaccaacttatctctgtccgacaatatcggcaggtcatttagagactgaagtgtgtcctcctggagatccggcgacagaggagcatcagcatcaaagttattgccttgagaggataggtgattgtgaacccgagactcttgaactggagaaggcggagggtcttgctgaggagttggaggaaccggctgaggagttggagggacaagctgaggagtcggagtggctagctgaggagtcgacgtggcttgattctggacttctacggaagaagtcctttgtagttgaggttgctgaatcacggagtgctggaataactgttgaggcggagggtagttccggacatgagctgtcgttgactgtacttgaggaacggaggctggtctttcaggactctgaagcagagggttacgttgagctgctggcgtaaagtcgtactgagccggaagagtactcggtcgtccagcaaccgtggatccggtggcttgatgagcaagtttaggagtggttcgccgcttttttcctcgcccaaacatcgtttgacggagagaaaaatgctggagactgagagagtttgtaagtatgaaatcgaagaaagattgagagtgtgaaatcaaagagagattgtgagtttgattttgaaaatacaatgtgagtttgaatcgaaatggttggaggaatcaaagagaagaaagatcgaaaaggatgaatcaaagagaggaagagagatcgaagagagattgctagggtttcgaagtcagctgcgggaagaaaaaaacccttaaaagggtagggtttagaattgttgaagtagggtatgggcctcgcgttcgggccagaattttgagttttagtcgcgactttgtttgggcctcaagttgttggcccaataagtttgatattagtcgcaaaactgtaactagatattaattcttttaattgtgtttgggcctcgagtttttgggcccaataagtttgtaattagtcgcaaaagtgtcagtaaatagtcactaatgttaaattcttgtaattgggtttgggccgcgagattttaggctaataaatttgttattagtcataaaaatgtcagtaaatagtcactaaatttaaattcttctaattgggtttgggcttaactgtttgtgggaaaagttaaatgttaaatgttaatattaattataattatacttacaatataattaattatagtaaatatacttagtcaaatctaatatttttttatttagtcaaattaatttaaattttttgcataattatatataattaaaatcatattatacaataatataacttaatttgatatcaatatattacaaaaacataatattgttctacgtcttcttgttcgtcatcatcagaagacgataaattacataggaatcgatcttctgtatcggtgtctccgagatcgtaatcaagatttattgggtatcaatcttctgtcaaattgtcgagtacaagatcttctattgtagtcattaaaacagcatcatcattttctgtttgcaatagagtctcgtctttcttttcatattcttctaatatgtttccccttggatttacttttaaaacgttgagccacttccgctttgatttcttcgtgtatagataaggtataaaacagacttgttccctttgagatgttgtttgtaaatgcaccatgtttggataattacataattgtatatgatcaagaaaaactaaatgaccatatatatatagtgtatgtacctaaaataaatggctcgtatttgttgtatcttctcgatgaaagaacatcgacaacaccactattcctcctccgagtgcctcttctaagcttagggtcataccacgaacatttaaaaagtgttatttttaaactgaccaccccctcatattcaagttctatgatatcatttaagttttcgtaaaaatctgcggcgtcagatgcatccgcaaaattttcacctttcacacataaaccatagttacaagtcttacgtccagttccatgactctgtgtatgaaacaaatagccttttgtaaaatacattggccaggttttgactttgtgcaaaggtccatgtactatctcttgaacccaagatggaaatggattactcgtgttccaatatgtaacctgtatgcaaatttagaaataaacatcattatagatatgaagaataataaataaatgcaaatcatatatagataaattatttagacatacataatctttcacccacacatgatattcttcacctcttttcacgtagagttctttttcgttcaatcatggatatttaatagaaagaaaatctttgaatatactatacaaaaacaacaaatagggcttattaaccaacatatatatgagaattagttatgtgcgtagaatttataattaaaaacttaaaatgggagtatttaatttgttatatacctctcaattacttgaaaataataacaatttcgtaaaacatatccatgtgcgcattcatagtcttcctctaatcgacgtgagtaaatatattaggtactacatgaacataatatacaggaacttcaccctcattgaatctcgtgaacctgatccaaatgaggtaattcatggttattaacttgaaaaattgcttttgtaaagatgtttaattactatatatttaattaccttgattttgattgtatattatcggcaaagtagtactctgagaaataagaattctcgtcactgatatatgactcaacaattgatccggccgcatatcttttattttttgttttttcctttcaacttgttgaaaaacctctcaaaagaatacatccacctatattggacaggaccgccctattctgctgcgtaggggagatgtataggcaggtgctccataacatcaaaaaaagatggtggaaagatattttctaagttgcatatgatcaaaataatgttaagcttaaaaatttgaacgcgacttttctgcatagttctcgaacataagtccctaaaaaatacgccaacccctgcaaaaaaatataaattgcatcatcttaggttaatataaattgcatcatctcaggttaatatatatataatataaagagtaaattatatattcttattttaccagataatgcaaggtgaacgttccggtcgagaagttttgcaaagataaatggaagtaaccgctccataaaaacgtggcaatcgtgactcttcatacctgacaacttcccattctccatatcaacacaaccacccaaattagacgaataaccatctggaaatttgattgcatgtttcacacattgcaataaactcttttggcttcatttgttaatgtataagaaggaaatggagctttttccttactatcaatatgtaagtcaggccgagaacataatcgttctatatccattctttacatgatgttatccttcatgctcataagagtattcattatgttatccaaaaaattcttctctatatgcatcacatcaatacaatgtcagagattcacgtctttccaatatggaagctcccataatatgctttctttgtgccagttatgttccttcccataacctgacatcttctgttcgtgactgtttccaccaacatccttggttcttggtggatttacaccagacaaccgctcgtaataaaaatttctcagcagttaaagactcaggtagatactcggtagaagcgtcttttccttttcagaagttttttttgttcttccgtaatggatgaccatgaggaagaaatcttcagtgacaatcaaacagcacgtcttcgttccattaggtagataaaaagacttagtactttccatgcaaattggacaagacaatttaccgtgggttgtccatccggataacatgctgtacgccggaaagtcgcttatcgtccacaacagtactgcttttagattaaaattttgatttaaagacacatcatatgcatcgattcccgtagaccataactcttttagctcctcaataagaggttggaggaagacatcgagactacctcgcgggtgatttggcccaaaattcagaattatatgaaacaagtactatgtattcatgcacataccaggtggtaaattatatggagtcaggatcacaggccacaaaacaaaaacaatgttgttattttcgtactcacgatctcacaacaaaaataaaattccaattttacccttaccatctcaattaactattaaattttagatgatataatttgaattttataattttggataaaaattaattttattaacattttagtttatggtatctaaaatatttaaaatttcatttttcttataattaatttattttaaaatttaacataaaaattagagaaaattaaaaatattttaaaatggccggtaaacattcttcgtggtgagaaactctttattcaattttatgttcttcacgaatcaaactagtttctacaaactctcaatccaaattccatcgtctttttcaagatttatcaattcacaaaaatgattaattttgtttttagttgcaaaatagccaatctcaacccgaatctcaacgaataagattaatcttcgattctacattttttcaaagagcaaacgtctctttgatattgcaacgataaaataagattgtaaaatgactattttaaaatatttttgattttctctaatttttatgttaaattttaaaataaaataattataataaaaataaaattttaaatttttagacaccataaactaaaaggttaataactttaatttttatccaaaattataaaattattatcatatcatttaaaaattaatagttaattgagatggtaatggtaaaattagaattttatttttgttgtgagatcgtgagtatgaaaataacaacatttaattgtttgggtattaaattgcatagttttattacttcgtgtatttatcttccaagcaaaaacaattgggtattacacgtccaaatcaaaattacttgagttttttttttgggttttttcccaatataatacttttgcttaacctaatagtttcttgcttaataacaaaaatccatacatattgggccttgttcccttctggccaaatgggcttttctccaacttttgtgacgaatttgcgtcaaagtagcgacgtcgctcgcaattaaattgcgggaaaacacacgctaaacaattggccaaaatttaggtgattctcagtttcccttccatttctttctctttctcttctcttcaattcgagaaactttggatcttctgttggcgaaagcatcatcgtcgcctgcttcgttcaatcaattggcttctcatcttttttctttctttctagagattttcaagctcacagtctgtctcttcttctctaaaggtgtttgccgatcaatgggttttgttgaacaataagagttagggtttgtttgtttgcatgataatagggttgtgaaattgaaatcgccctctgttatctatctttgctggaaatttatgttctttggtgctaattttatggtcaatcgattgtcttcattaagcttttttgttgttttatgtctaggcttctttttctggttatggattgagagatggaacattaatattttctttttggttgtttaacgctttgttttaagtttgattcctagatttatatgtctcttttgtaacttgtttgtttaagattatgcgttttgttcaatatatctacctgttttcttctcttctgcagattttgcagctgctataaaaatctaaacgagcacaaggactgtaagttacacaactacatagtacttttcttgagttatataatttcccttgagatatcttttcagtaacttagatagcattgtgttcatacttgtaggtgagaagaagatcagttttcttcaaggtaagatcacattgattgagatgttttgccaatatatcttatgaaactctgttttgctgcttcttctattagcaaccttggatcttcatttactttctcgatctcacgtttggatcaacagttttaaggtttatgattcctgcgtaatttattgcatagcttaaaacgatgatttctactgctaattcctttgacattattctgcgtaaattgggattttgtattctctgtttctgtaccaagcttagcttaatcgttatgcatttgctataatatctatttccacattttgttttagacaaagtggtcattgatggattttcttcctcacttatgaattgtgatggaacttagtaatcttttgattgcttctactgccaagcctcaagattcttttttttttaatcattcaagattttttttcatgaggcatacttatgttgcttaatgtgattactatatccttcgaagtgttgatatacaatatgtctaggttaaggctctttggaatgctagctcggtgaccgttctgccattgattagatttccaaatattattgcaaggaaggaataagttcagtctcgtggttctttatgtgttagaataaagatttctagatttttcattcactcatggtcaacaattgtctgatgcttctatttgttgttttatagctaggcttctttttctggttatggattcagagattgaacatctttatgtttctgtttggttgtttaacgctctcttttaaatttgattcctacgtttttagttctgttgtgtaacttgtaccattcactcatggtactagtaaaggcttagagctgtctttttggtttcactttcgtttttgatttattactttgacttcaacctcttggttcattattaatcgattgttcctctttcttaatattgattttagaaacttaatagctaaaatttcatatctcttggtgtttataattttagatgcaatgaatgggtcattataggaactttaccagaaatagaggacaacggtctaatgggtctactactgttcggagttcacagtcctctcctcattcgactacaagagcatgtcctcagacaactgaaccggtgcaacgcagcccatctctttcaccacataacactctggttcataagtgaaggaaatagatgataaagcaatgcctatgtggatggatcctaaggtatggaagggcctcgaagtttttttgcttgatccatagtctgaaaataaaagtggtaagtgttcaaaatctcgcaacactagtgtggccagtcatggtccgagtagacacacctcaggtcaaaagacttatgctaaacgagcattagaaagtgtaagtaatttatgcttttcacttttttctcattttcctagtttcatgatgatgattactactttaactttcatgttaggctgagaagaatggaggtcaactccctccaattgtctagatcatggagcagactcacaagagaaagaatggagaattcattgatggttttgtagagcaaatttgcaagaaagtttgagccaagatcttagagcaagagtctcaactttttctgggtgattctggcgagcttggtggcttatcaacaactgcaaagaatcaaatcctgttcgaggtattatttttgaactgtctcagtttaaactgcaacatgctagttagttcttcacgttctcccttttttcaatcttgtttgagtttttaagtcttattcaattgcatcattgaatataagttgcatcattgaaccttttgagctattaagattgattgtttgatgatgggcttggtgaatttaaagcatagttctttgaaatgttatgtggtttttgatatgcatatgtttttgtttgatttttcaggctactccaaagaataaaaagggacggtattatggtgttggttctactccaattatcccatctgcttctgtcgatcgacatgctcgggatgattttgttgatcaggagacatatgaagcggagaagaaacggaacgacaaacttctaaaactacaactctagcaacaacacttaaagctcaaagacctacaacacaaggagcacaagagcaaacagaggaaccacatgaccaaccacaatccgaagtagcaacagctcagccatctcctcaagcatattttgctttcttgtgttgcattcaaaacctaacataacactacaagaatattgactttccttagcgtctgaataacgctatctaacgatattatagcgttttaacaagcgctctatcatcgtctgtcattataggtcgaagtcgtaacatagcggttattggtattgctataatttttttaagaaatatagcactttctttgatgcaatcatatattttacaatagcaattagtatctgttattaatattcttattaccaatctaattttgaattttgaattttatattttgtattttaagaactccaattttaatttacaaagacaaaaatcaataatagtactactattttatatatgaatttgttttgtacaaaaactttaaatatcctactaactttaaattttacacgattacagaccatgacttgtaaacaacttcgaacatttcatcctcttcttcttaagcttcttctcttttcacttacgactcttcacgttatcacccaatcttattggtctctccagcttgtttcttcgtcttcaatcctcttacacttaactttttttccgtaggaacagccacatgagacgtgcacgaaattgatttcttcaagtgatagaaaacctacacagacaaagtaaaaagtttatcactttgagccaaataacaagccaagtagcgactccacccatgaatttgagatacatgttttccgttaagaaaaattcttagaaataaaggtaccttaagaacatgactagcacaaactgcaatttcaaccaaaataacttagatgattctaaaatcaaacctatttcatggctgaaacatacattaaatcaaaattcaaaaactatcatgaaacaattaataaaataaaaatcaagaacacacaaaaacaattatggagaagaagtggataaaattggaattgagagaagcaaatatggagaagtaatagagtgagactgaccggtttggagatggcgtcagatctaggaaatagcaacggagaaatagagtgagactcaccggcttggagatggaaacagatctagaaaaaggtgacggaggagacgcgaagggtcccgaaaactaacttgtcgttgcccaatgtcgtcgagatctcactggagaaacagttgtacgagaggatgatgaggtggagttgatttcgtcgataaatttgccaaaaactcaccggagaaagcatcagaagacagatctaatcttatgagttatgagagagagaggaagagttagaagaagatgaagaaggagacggcaggaccaaagaagagagaaaagaaataaataactttaggtcaaatgttaaatagtttttggaatttaatattttatttttcatttagatagcgattagtatttggtatgtgctatcaaataattaaccgaaaccaaaaacattgatccacgtcagttttttttccaacacaaattatagcgtttcattttaaccaaacgctataacatattaaaggaaatgttaatcctagcaaaactatgttagttgctattttctattgctattaatgctttatattcttgtagtgatgcttttctttcttagaatatcaaacaatttcagttttaatcataattcatatttacttttgatttctgtttttatttccgatttacttttaatgttaaattcaaacaaaaagtccaatttgtgaaactgggtttaaattggattcttgaactatccctggcaaattcctcgctctacacgacacacttacttgcatattcatcgcaacattgcatgtactttgcgacgtttatattccgtaggctctacgagggacctgtttcttcgcaacagtgacgacacaattgcgacgaattttgttttgcgatgagagattcgcgacgaattcaaatgcgtcgcaaagtacatgcaaagtgatatttacgacgcatccgcgaggagaactacctgccttgcaaatgacctgttttcttgtagtgattgtgagatgtgaagataatgatacgttggcttggtttgtgagaaagctgaaggttgaccttggattgcaattgagagataacctaaccatcatctcaaataagcaaaaagtttgtttttaatgaaaaaatctattagattataattgaataaccatcatctgtttttaacaaatgtttatggagggaattgtgaatgtaattgcatccgagcttccaagtgtggataatagaatttgttcgagacatatatattcaaattggaaaaagaattatgcatcttcagagtacaaagtcatgttctggtctgttacttatagttacaatacgagggaatttgattataaagatgaagttattactaaactatgatcctaaagcatatgaggccttgttaaatacacaacataagatatggtcacgtgcttacttcaatccgagttctcaatgcatgcatgttcacaaagatattttagaaagttttaactagacaatcagagaagcaaggttaaagccaatcatcaatctattggaaactctaagaaggcaaacaatggagaggatctctcggaggttgaaacagtgtttgacatcggatgtccaattttaacttataacacttaaaagtgttggagaagtcgagggttgatgagaggtattgtgctactttatgtagtactgccactttgtatgaggttgttgagtttgagagttcgtatattgtgagcttctcaaaccatcaatatgcatgtcgccggtgagatctcacaggtaagtgattatattcatatttttcttgttttcgaaatatgatttgtctcacttttcatattgtttaaggtattccttgtatgcatgctttaactatcataaatgacaatgaggacgatgttaacaagtatgttatcttaatattattactcaaaaatttgtacgggaacatatacaagaatcatttatcctgttaatgaagtgaaactttggggaaaaacagcgaaaatacccattcgagtgcgtaattttcgcatgccaccaggaagaccaaagggttacaaaaaggaagaaagagcctaatgaatctaagaccaactctggaaattcaataagacatgggagaatcatacattgttcaaattattgtgaagcaagctataacaaagccaaatgcaaaaatacgaagaacccaattctgcgtaagaaaaaaagagatcgacttcctaagaatcctcaagaggtattatattgtgatgtctcctatttagatcatttttacatatacagtctcttatcttggtgtcatttcctctatagataccagttcgtaggcctccaagatcagcatgtaatacaaatccaaataaaacttctaaaaaagcatcaaatacagcttaaggataatctcatcgactttcaaaaaagaaaaaaaattaatgcaattgctagtgtcagtaaaccatcacatcttggtgaatcaactatatcaatgcttctagctgcttcaagttctcctcagctatcaatctcatccaaacaaccacctgcacctagaagtaactaaccattgatggtaaaaaaaaagtgttaagattccagctggtcgtaggatactgcattgtccatacacaaaccgagtgtttgatgtttgggaaacatatgctaaagacttatctggtgaacaaccaaaatgttaattatttgcatcgttttttttttgtgagaccttttttcatagtattaattttttgtaatattttatggcgtaagaattttattaggttatgattctttaaccgtatttcaattatatattatcttttatttttgtatgtgaattctcgttttaatccacgtgtgaaattaaggtacaaaactaacgacaaaaaaagtcattaaagggtgtttcttattttgaaacaaagttaatgttgactgttagtcaaccttaggttcagaacaaatttggagatttggatgtttatgttgataaagttaactacttagaggttttaaatgggaataaaaaaagtttgatgttttagttaggaaaatattttgatttggaggtttgttttgagattttttctataataaaacctttttctttagtagtatactcttctacattttgaccaaatatttgctatggattatcaaatgcatataaaatcattgttatttaaggactcattgtctccttataagactcaagcctaataaaatgtcataagcaaaatgactgtttgccataatcttcgctgtaaaaaacccaaaactaatagttaaccatcaatcttctgttatataagtgattcaaggtcttttaaaaaaagatttttccattttcacacttgacacagagaaaaagagttttctttcttctgaaataaaagtttactctttccaaatcttatataattttctaattcctgacaatatttgttttaaatatcggtatttgtatgatcgatactttcatacatataacatcttgctaccagaaagttgttgtctaacgacatcaagttaaacctaaattattgaaaataatctcaaaattctcaaaatgatgatggtatcaaaattatacatctataatacttatgcatgtaaaatttaaacttatcaagtaatctttgaccatcttagactacaaaagtagctaataaaagcttaccctcattgaaaactcaaatcacataaaccatcgagacaataaatcaactaaaacaaaaatatagaagatgagaaaatattgatcaacattgaagacttggaaatctacaaatgttcaataggatatagtctcctttatatgacattactaaacccccaaaaacttccttcacttcattcatttctctcaaaaacccaaacctacgagtttccatgacctaagttcaataagccaacccgatatcaattcaaatcatgtaattttcactatatacagaaaaatcatgttcacgaacacattattaattcttcgtcttttttattgtttctccacctatattcttgttgatataatccatattcaaacacatgagacaagctgctaaacatagttccaaaagaccttctttctatccatattaaattggattgttttgcaacattcataatataataaaactttttttcagcattatactcttcttttatattttgaccaaatcttggatatgaattatcaaatgcatataaagtcattgttatttaaggactcactgtctccgtataagactcaagcgtaaaaatatcttaataagtaaaatgattatttgccatattttaatattagccatgaggaacccaaaccgaatagttaaccatcaattttcttttatataagtgattcatcaaggtcttataagaaaatagtttttcattttcacccttaacacaaagacgaagagtttgctttcttatgttatacatgtttactctttccaaatcttatataattttctgattcttgacaatttttgtttagaatatcataagttgtatgattgattgtttaatacatattacattttgttgccagaatgttatggaccaatgacatcaacttaaacctaaaatatttaaattaatttctaacttttcaaaatgttgttggtatcaaggatataaaatcaactatgtatctataatatcttggcaggcaaaatttaaacttttcaagtaatatttgaccatcttagactacaaaagtacattataaaattttaccatcatagaaaactcagatcacataaaccatcgagaagatatatcaactaaacacaagacaaatgattagaaaatatatgtcaacattgtcgacttgaaaatctactaatgttcagtaggatatagtctctcttatatgacattactaaaacctcaaacacttccttcactttattcatttcggtcaatcaaaaatctgaacccgtgagtttcggtgaaccaaattcaataaacccaccagtatcatttcagatcatgtgagctttgctataaacaaaaatttcatgctcaccatcacaatctaaatcttattcatcgtcatttttattatctcttcttgctgatataattcatatcaccactaatgagacaagctggtaaagatagttgcaacagaccttctttatatccatcctttggatattttgcagtattcaaaatataatgaaatatttttattcagaattatactcttttctacatttgaaccaaatcatggctatggattatcaacatctaaaatcattgttatttaaggactcactgtctccgtataagacttgagcataaaaacatcttcataagcaaaatgattgtttgccatattataatcttcaccatgaggaaatcaaaccggatagttaaccatcaatcttcttttatataagtgattcatcaagttcttctaaaaatatatttttccattttcacacttaacacaaagacaaagagtttgctttctcataaaaaaaatgtttactctttccaaattttatataattttctaattcttgacaatattcgttttaaatatcattagttgtatgatcgatacgttcataaatataacatattgttgctagaatattgttgtctaacgacatcaagttaaacctaaaatattaaaaataatctcgaaattctcaaaatgatgttggtatcaaggatatataatctaaatatgcatctataatatgtatatattcaaaatttaaacttctcaagtaatctttgaccatcttagactacaaaagtaaataatgaaagcttaccccattgaaaactcaaatcacattaaccatcgattagataaatcaactaaataaaatgcagaagatgagaaaatatcagtctacattggcgacttggaaatctacaaatgatcgataggatataatctcccttatataccattactaaaaccccaaaaacttacttcacttcattcatttctttcaatcaaaaacccggacccatgagtttctttgattcaaattcaataagcccaccgagtatcaattcagatcatgtgagcttcgctataaatagaaaaatcaagcttaccccacaatcttaatcttatttatcgtaatttttatttttctccacctctattctattgatataatccatattcaaattcatgagacaagttgctaaagatagttctaaacaatgttctaaaaatcgtcctagtcgccgcctagtcggacgcctaggtgcttacttatggtcagccgccgtgatttctaaagtttcggtaaaacaaataggacatccactccaggctgtgcaattcggtacaaatcagccaattcggtcaattcgttcggtttagtctagtttagtctggtttcaaaaaattacaatttttcttactctatgtcgattaagttttgcaaaccaaaaagttataataatagaaaacagttatgaaaagataatgaccgagagtctaaaaatgtggactacggttaactgactaattgtttaaacagtttcctacatctctctgttttctctcttatatgggattaacataacacaaatcatcatcttggattgcttttgactgttgtgtctctttatttcttttcatactctttaattctcaatttttgtacttgtaagagaagtaattggtggaaattggaatcgtacttctagctctattttggttttagtcaatttgtctttctcatcatagtcataggatattattttaacgtttatgatctgttactatatctactcaaaattgtttctgccttttttgtgatcaattactctgtttgtgtctttgttttaaatcggtttctcattgttactgtttttgtttttgttcaagaggctgcagacatttatggatccaccagctccaacatatgtaggttcagacgtaacaccatcacttaagagaaactcgaatggtatcggttgggaatatgagattgtgtgtaatccaaagaatccagataggattaaatgcaagttgtgtttgaaagagatgtctggaggagtgtatcggattaaagaacacattgcccacctcccaggaaatgttgttgcatgtccgaagtcattaaaagaggattaaattaagtgtagaaatgcaatcataaaagcaaggaaaaataagatgagcaagaaacatgaaggtgatctcctaagggctaaagtgaatatagatatgtagaagcttgaagatgaataagtttgcaacatatattcatcctgaagctcgtgttggtacacaaataagacaacagaacatcaatattgtgcaagatggatgtattgtgcaagatggatgcatcaataaggtattccttttaatgccattgataatgatgcttttaggatgttttgtgaggctctgtgacagtttggacctgacgggttcctccaactcaatatcaattaagggaaccactgttaaaggaggaacaagaaagacctaaagtgctcttaaagactcaaaaggcaggatggaaacaaaacggtgtcatgactgatgcatggagcgacatgaaaagaaggagcataatgaatctatgtgttaattctaagggaggaaaatgttttctgtcttctaaagacgcttccacaaattctcacacagggctatacatctttgagtatgttgatcgatgcattgcagatgttggtgcgaagaatgttgttcaagtggttacagataatgcgctcaataatgttacagcagcgaagatgcttaaagaaaagaggccaaatattttttggacaggttgtgttgctcatacggttgatctgatgcttgaagccatttctaagctgcctaagttttcaaagattattgagcaagccaaaagtcttattgtttttatttatgctcatcataaaaccttatcaatgatgagatttcacaccaaggagggatattgtgcgatggggagcaacgcaatttgctaatattttgttgacgttgcaaagcttgttagacaaaaaaaaaacagaattaacgtcgatgttcagctgtgaagaatgggaaaaatgcaaacattcggcgactacaaaggggaaaacttgtttcttaaccgttatgagtcctgcgttttggagtggtgtgatgtttgtgttgaagattttggacctttaatgaaattgctaagactagctgatggagaaaacaagcctttcgtgggttttatttttggagagctcctagaagtaagaaataagattacgatcgcttgtaataatctggagaggaattacaaaccaatattcgatatcattgatgagaaaatgaaagggagacttgactcttgtttgcacatgagcgcctttgtattgaacccattctacttttacgaagacgcaacaatcgagcatgattaggtgttaattgatggatttatgaattgtgtggggactttttaccatggtgagtttgaaatacaagctaaagtcgtcaatgataactttaataattataagatgaagtctggagcttttggagagctataactttgagaggatgtcaacaaaatgataagaaatttgaaccaagtattttcttgattttaataaccttaatgattatttgaacatccacgtttcttgatttagtttatattttagggaattggtggtcattatatggttgtcatgtgcctactttgcaaagattagcaataaagattctctctttaacacctagctcatctagttttgaacgtaattggagtgcttttgaaggggtaagtttcttgcttttcttttatcttaaatattctttttgattttttgaaggatagctactgaattataagactttatgttgcagattcatacatggaaaaggaatagattagatgttaatcgacttaataatctagtatatgtccaattcaatgccaagttgttcaacaagcaacaaatgatcaaagaaaaaataatgatgtgatttaagatgataaagatgaaagagatgcagaagaatagtttgtagagccaagcgaaagagatgaagagcctaatggtgagcctgtttaccaaactccaaatgagaaacctagagaagatcttgaatctcatgaagagcatgatatcactattgatattgaatttgaatcagataatgagcaggtggtgaatgtggatgtgatcagaggacaagaagtttaggatttaagattacttttggtttttcaaagatttaagattactcttagttttcattaggttaagctttacgttaagttttatttaggagaattttacattattttgtagcttaggtttcaacgagatcatttagatctaatcttagctttatcattatacatttattgaactttatcatggatattggaatttatgctctattataaaagtttaaaaataataaataaataaaattaaataaaaatacattaacgcctaggctctgcctcggccctgattaatcgctctacgcgctaggcccatgttgaccacctagctaccgtctatccattttttaacactggttctaaagaccttctttatatccatcataaattggattttttacagcattcataatataataaaacctttttcttcatcattataatcttcttctatattttaaccaaatcttggctatggatgatcaaattcatctaaaaccattgttatttaaggattcactgttttcgtataagattcaagcctaaaaacatagcaaaatgattgtttgctatattgtagttttcaccatgaggaatccaaactgtatagttacccatcaatcttcttttatgtaagtgacttgtcaaggtcttctaagaaaataattttttattttcacacttaacacaaagacaaagagttagttttttcaataaataaaagtttactcttcccaaatcttatataattttctacttcttgacaatattcgttttaaatatcattacttgtatgatagattctttcatacatataacgtattttagctaaaatgttgttgtccaataacatcaagttaaacctaaaatattgaaaataatctcaaatttctaaatattgttgttggtataaaggatataaaatctaaatatgcatttatcatacctatgcatttaaaatttaaacttctcaagtaatctttgataatcttagcctacaaaagtagataatgaaagcttaccctcattgaaaacttaaatcacattaaccatcgagaagataaataacctaaacaaaatgcagaagatgagaaaatatcagtcaacattggcgacttggaaatctacaaatgttcagtaggatatagtctcccttatatgccattactaaaacctttaaaacttctttcacttaattcatttctttcaataaaaaaccagaacctttcatgatgttccgtgactcaaattcaataaggtcatccggtatcaattcagatcatgtgagcttcgctataaacaaaaaaatcatgctcaccaccacaatctttatcttattcatcgttatttttattgtctcttcacctctatttttgatgacaaaattcatattcaaactcatgagacaaactgctaaacatagttccaaaagatcttcattatatccattataaattgattttttttttatagcattcataatataataaaaacaaattattcatcattatactcttcttctatattttgaccaaagcttggctatggattatcaacttcatctaaaatcataattatttaaggactcactgtttttgtataagactcaggcctaaaaacatcttcataagcaaaatgattgtttgctatattgtaatcttcgtcatgaggaacccaaaccgaatagttaaccgttaatcttcttttatacaagtgatttgtcaaggtcttttaagaaattgttttaacttttcacacttaacacaaagacaaagagtttgctttctcaagaaataaaagtctactacttccaaatcttatataattttcttattcttgccaatattcgttttaaataacatctttttggtaaaatattgttgtccaacgacatcaagttaaacataaaatattaaaagaatctcaaaattcaaaaaattgttgttggtatcaaggatataaaatctaactatgcatctattatacctatgcatgcataatttaaaattctcaagtaatgtttgaccatcttagactacaaaagtagataatgaaaggttatccatcctcgttgaaaactcaaatcacataaaccatcgagaagataaatcaactaaataataagcaaaatataagaaaatattggtcaacatcggcgacttcgaaatgatatagtctctcttaaatgtcattacggaaacctaaaaaaagtatttcattttattcatttctctcaataaaaaactcagaacccatgagtttccaagatccaaatccaataagctcacccgatatcaattcagatcatgtgaataaacaaaaacaatcatgctcaccaccataattttagtcttattcatcgtcatttttatggtctaccgcctctattttctttggtataatccatattcaaactcatgacacaagttgctaaggatagttgcaagagatcttctttatatctatcacaaattggattttttttgcggcattcataatataataaatatttttcttcagaattatacttttttctatattttaaccaaatcttggctatggattatcaacatctaaaatatttgttatttaaggagtcactgtctccatataagacttgagcataaaaatatcttcataaaaaaaatgattgtttgccatattataatcttcgccatgaggaacccaaatcgaatagttaaccatcaatccttatttatataagtgattcatcaagttcttcaaagaaaatatttttctattttcacatttaacacaaagacaaagagtttgctttctcataaaataaattttgaatctttccaaatcttatttaattttctaattcttgacaatattcgttttaaatatcaatagttgtatgatcgattctttcgtaaatataacggcttgctgctagaatgttgttgtctaacaacatcaagttaaaactatcggtatcaaagatatataatctaaatatgcatctataatacctatgcattcaaaatttaaacttctcaagtaatctttgaccatcttcgaccacaaaagtaggtaatgaaagattatcctcattgaaaactcaaatcacataaaccatcgagaagataaatcaactaaacaacatgtagaagatgagaaaatatcggtcaacattggcgacttggaaatctacaactggtcaataggatatagtctctgtggatgtcggattcacacactcaagtatttatttatttagtgagaaggattattcttgaggacaaatgtactagaaaatagattgatgattttagagaaaactatgagttttgtaagaaaatgtgtatagtaagtttgcacaaaaatgtgtgtgtctttacatggtctttgacccataatttatactcaaagaatacatttaattctcatttacacgcaattattctctcttaaatgcatttgtttcagtcttcgaattaactattcaaacgttcgaatttgaattgactccgaacttcttgtgcttcatcttccaacccacttgactctccaatctaggcaacttttgacctcgatgtctcactcacctcgcagatcaatcaccccatttatacgcttactcaaggaagcccataggcctttcatcttttgggcctctcccacttacgtggcaatctttgaccggtcccgagcccatggtgcgggatcggacaccaacaattagccccccaactctttcgaagtgatactccaattcagaagactttaatgctctaatgggcaaagattgctccaaatgactctctgatttcccgccaaaatcacgtcattcctatgattctggaatcacccataattactctcgtgacatatgtcacaattatgaccgcaaatcaattatttactattaaaacagggaaaactcttccacttcccccacgactcccaaggcggttccgtcatcatctctagcttgcgtaaggtaaattcactttactctctccttattatttttcactctttatctttcttttagaacaaagtttctttcttcttcctctctgcactttctctcctacgaacccccagactgttcattttcttacgatgaattctgaaaacaaaaggcctgaatctccatattttaaagaaggtggctctagtaatgacctttacacccggccgaatgacatcgccagtccacattatcaatccacatgcactcttcaatccctcaaccgactgagagaactctgccgaatcccactcgaagttatgagggattcacagatgccagagcccaccgaatcgtcggaggaccactgtcccagattcttttgcgtttatgaaatctacttcaaaggttgcggattgaccttcccccttcccgaagctttggttcggtatttggctgctcttgaaatcgccttacctcaattgacccctaatctcctctgaaccatcctatgtattattaccatcgcggcggaggacggtttcgtcatcggggttcccgagttgaacgaacttctcagtgttaggagttcgtcgaagaaaaccgggtacttttcagcatacccgaacgccaacaggaatctcatctcgaatctcccaaacaaggatgagaatcggcaccatctttggttcttgattaagaaaacccctgcctcgattggaaatctttccgatgtgctcccatcgaagtggtctacgaaacctggtagaaattaggtcgtatatgcctttttgcttatttttttcttctatttaatcgactttatgatttccacttcgcagctttcattgctccaactctcccgaccgtagaattcgttgaattcttcaagattgttatcgagggagagaccctctggaactctttcactcttgatcggttcattgaggccaatcataagcttagaatgagtccacccggacaactactccaacttccaccacctccacctctacctcacgaaacttctactacggctatagcttcccgtcgaaagacgttatccaagacgatgacagaggcttgtgaggcgaacaagtcattccttcagtctgctgtcgacaagaaagaatacagtagaactctgctggtcgacgatggtagctgtcgacaccgcaccgtgaaggtcatggcggccggtcacctcgtagagaccgatcaccacgtcgtgactcacctcggcccgcttctcggactaggttaagcagcagtcgatagcagacttgcttcggaaaaagagagaaagaccaactcgcagcagttcctctcctaagagagatagcacgagaccccgaactgatcgctctcctcgatcatctcccccacctcgatcaatgggtccccctcctccagtcatcgcatctccttcttctagatctgggggtgaaaagactggtcggagtgcagatcctcgacaggaagaggctgagccccaagatgccaaccctaagtctaaggccgttctagttcctcaaaccaaatcacttgcaggttagaaattaccatttatcctctttacttgctacatcgtttgattcatcggcctaacttctcatacacgggttcgaatctctttattactttgacagcgatggaaacagagggaaacgtcttccaatgcttcaagactcggaaagacacaatcctgccaacctttgacaggtggcatcctgcaattcgcgagcgattcctacttcacgcccatcactcatctcgggttagctctctttatttgtgacctttaagctccactctttcgcttatacgctaattcacctttgaaacccttggttcaggcaaacatcgaactcaatgacatgattaagtattacgagaggttgttgcttgacagggaacaggatgttatggcctggaaagataagttttcttctcttgagtccgatctacgctcttccactgaagtcatgcaaaaattggaagatcaattggataatctttccttcaaaatcatgaagtcgaacggcgagttgcaggatcagtatcagaggtatgacaagatccaggaggaactctcgaatgctcggggcagactctcagaatctgaatccagtgcttacgacttgtccaaccagctatccgaattgcaggccaagtacaaagcaatcgccaaacttcgagatgctgagttagcgaggtcggcatcgaaagccaggaaagaggtaaagggtcgcagaatggagttgattcaaggggcaatcattttcatccaaaccaagaaaactatgacggagctggaatgagatatcaaagagtatgaaagcaacctccttcttctggatcaaacccacgacgagaatttttccgaggaacaagaaaggttcgaattggaagccattctaacaaagaagcgaaatcgtctagccgctcttccctcttcatcattcaacactcaatagttcgaagagttctttaccaagtcgcctcctttgagcgagtccggtttagattgggctggtaagttttaaaacctcaaattttgataccaaaccagagtaagttatacatgcgtttttcctgattcgagatgattgtttcaggtcccagtgatcccgtggaacccgaggtatccatcatgcttgtgaaaactcctgaactggtagtcatcccaccagaaattcctccacccatgaacactgaaacagtggtaatcgaggacgatgatggtttggaccctgggattactaccgaacagcccattactgacgaaccggatgagactgagacggctgccgtggacccggtcgatcctgagccgactcaacctgaactcgaggtggccaaagatccatagtggctgtgtccacttaaagggggttgtccctttttattaacaaactcgaagtttatttttcaaactcttttcatcgcctaagtaggctttttattttctgaacaagtgttttgcctgaggaggcttttaaacctttttaagaccatgatcccaagaggatttctgcaatatttaagtacggatttgcaaaggccatcttttaaatagcttctttgtttaaccatgtcgccaagttgtgagatttgtaggctgatcagacctatctcttaaaatgtgagtctgaactcgttttaaatccgcgaattccccaactcgggtttggtcaattcgacttatttactgggcttgggccttaatcgtttttcttttatttaatgaatcgtttgtctttaatgcgacggttgccatttccttcctcggaaaataggaaaagcctcacgtctataaggcaataattgccttttcctcgatttccaaaaatgatttaaaccatttggacacgccccaattattaattttgtggtttcgagaaaaaccctaactctctataaataagagcacaaactgtcattagtgtcccaaaatatgatctcagaaatttacttggttaatacttcaagaatggaaaacgaaagagcctccaccgtatgtcctcttgaccctggtaacccactgtttcagtccgacgatggttttgagcccaccggcgttctatttcctcatgcctgcgtacgattttatggataaggtaggtctcttaccctttttcataccgaaacgactcctactcatactaaccaatttttgtattaggtcgtcgacaagcaccgccgcctatgcgatgaaaggcagcggttgggtctcaagaggcaaacgctcaagacctgaattgccggtatcgagaggacggtgagggccatggagagcgatcccttccaatgggaatggaggaactttgactgtgtggcgaagatcccgcacatgctttggatatacctctacgctcgaggtcaagtttcttgtcccgtaaacgctccggtccaagtgattccgtctgacagtgaagagggtgacgacgaggaagaggataacaacccttggaagcgtgtgaagaatgaacccaaagtagacgtcaagaacgaggcatccacctcgaaccccaaaccggcgatgaaggagcctgttcccgagccctttccgtaaatgtcccccgaactcgaatatttttttttcttttttttttttggacttactcttgggccatggcccattttcacttaaggaaactttccaattttccttgatttttcaaatattcgtttttgagatattctttgaatgctgggcgagtaggacgacttgaatgcttccgcgaatcactccgaccttgaatggaatcacatctttgaaagaaaacctaaagagacaattaatgccaagcttgcctgctccttcctccttcttgctatcgaacacgcgtttcaaaacataatcacccacaaagaaaggtcttctttttattttttgaattgtaatatcgagctgccgcttgttgataatttgaattcaaatcagggcctgatctcgcctctcgttgatggtatctagcgaatcgtctagcatcgcgcaattctcttcttcgtttaaaaaagcttctattcgacgaagtcctggcacattgagctcggctggaacaatcgcctccattccatataccaatgagaatgggggttctccggtcgagcgcctaggagttgtgcgatatgcccataaaaccggttgaagttcatcataccatcctccttttaaatgacttagacgtttcttaagattgcttagaattgtcttgttcgcggcttcagcttaagcgttcccttgtggatattacggagtggaataactaactttgatcccccaatccaagcagaaagcttcaaactcatgtgaaatgaattgtggtccattgtccgtaactatctcgtatcggacgccgtgcctacatatgatattcttccaaatgaaggtttttactgccgaatccttgatgtttacatatgcttcggcttcaatccacttcgaaaagtaatcagttaggaccaagagatactgtacacctcgggttgacctgtgcaatggtccaatgatatccatcgaccacctcatgaacgggtatagggcagaaatcgaagagaataactccgaaggttgatggatgagaggcgcgtggagttggcgacgtttgcattgctgggaatacttaacgcagtctatgatcatagtaggccagtagtatcccatcctcttaatcttgaaagccatagccctacctgaagagtgactgccacacaaaccttcgtgcacttcgctcataacgatctcgacgtcgggcccaaaaatgcaaagtaaatagggatcgcttacacctcgtctatacaaagaatccttcgatagacaaaatttcgcgctaacgattctcattttcctagcctgtcatctattctttgggagctctactgtaacaatgtaatgttttattggctccctctaatcagccccccaatctttagctggaatttggttgatttcatgaaatattcgagcttctggttcgggatgctaatttggttcaaggatgtcttcgtcaacccatggttcggtctcggctttaacaatgctttccggagctatatcttctattggttcgatgatttcttcgaccctattatcttcttgcacggccggcttaggtaccgccgccctttttgatttttgtctcttgataggtggtaattcaatcgcgttcaccgcaatcccgtgctgcagctcaagaccttgtaatgacgaatgtttcttccttaatgcttctatccgaaatacactctaccggaattgttctcttgactttggggtctggcattgacgccagagccgcgagtgtgtccgtggttgtgttttctcctcgtggtatgcgaatgagttcgaacttcttaaaaattttagccaaatctctcaccacctcaagatatgtctccattcttgaatctttggcttcatagtctccattgaattggttaacaaccaattgtgaatcagagtaggcgatcacttcatcagctccaactccctgtgccaacctaagtccggcaattaatgcttcatattctgcttcattgttagatgtagtgaacaataaccggaatgattgctcaaggatttccgaggtgggagactccaatttgatccccaccctggaaccattttttgatgaagacctatcgacgtgtaacttcaaggtctgattttctggttgctcccgcccgccaagtaccggaaattctgttaaaaaatcggcctgaacttgagccttcatggcgactcggctcttgtactctatatcatactcacttaattccaccgccaacttcgccaacctcccagattggttcggactatgaagaattgttcgaagcggttgatttgataagacttcgattgggtgagactgaaaatacgggcaaagcttccgagctgaggttactactgcaagtgcaagcttttccatcatcgtatacctggtctcgggatctgtcatggatttgcttatgtaataaattggtttttgttctcctcggtcttctcggatcaagactacgctaactacatggcccgagtccgagacgtatagataaagcttctcatccgcttctggtttggacaatataggtggagtggtcagatatgctttgagctgtctgaatgcttcttcgcatttctcatcccaaagaaactctttgttcccttttaaaatttgatagagaggcaatgatttatcggttgatcttgaaatgaaacagttcaatgccgcaatccgaccggttaaccgctgtacttccttgaaatttcttggagatggcatattgagaaaggcgttaatttggtttggatttgcctcaattcctagctttgtaacaatataaccgaggaattcactagatgggactccgaacgtacacttccccaggtttaacttcatttgatattggtcaaggatagcgaaacattcttctaaatgcttgacatgatcttcctttttcaatgatttgactagcatatcatcaatatagacttccattgtctttccgaggtgctcgttgaacattttgttaactgataagtcgctctcgcgttctttaacccgaaaggcattaccttataacaataaatccctttgtccgtgatgaatgacgttttctcttgatcttctggattcatcatgatctggttgtaccccgaaaaggcatccatgaaagttagcaattcgtttccggcagttgattccacaagacgaaatatatgcggaagtgggaaactgtcttttggacaagctttgttaagatctgtaaaatcgatgcacactctatcctttccattcttctttttgaccacaacggtatttgccacccaatccggatactgcacttctctgatagatcctatttttaagagtttttccacttcgtcgtttactgcttttgctcgttccacattcaactcgtgacaaattatacttcggtctatgccgggcatatctgttgctgaccaagcaaatgatttcttgttccttcttaacagctcgattaaagcttcctttatttcgccagataaagtagctccaatccgaaatttctgatccggtttgtcttcttctagaattacttcgaccacgatatcgtccaccttccgcccactaggaaacctcgggactactcctttctttgcgcgcttcgataattgctattggattttcaatcagtggctagctaaataacaaattctcgaagcttcttggtctcccagaattgtttccactccgtttggagttgggatttgaggcagtgatgatacgtagaggggaccgctttcatctggtagatccacggagttccaaggatgatgttataagctgctggtttttcaaagacgaaaaaatctacaatcttcgacatctttcccgccaaaactggtagcttgattgttctgaaagacattgctgatttacttgtgaaagccactaaaggggatggcggtcctactacatctgccctgcttatccccatcttttccaaagtgcttaggaagattatatctaccaaactgccagtatcgatgaggattcttgaaacctcgaaattagctacatccagcgtaattactggagcatcatcgtgaggtctttcgaggtgctgtgtttccttttcttcgaatgatattgaagcgccttgaaaatctacctcttcacttaaacttgacttaaggggaacattctgtctatgtttttttattgcgctgatggaatcacggcaaagtttggaacctccaagaattacgttgattttaccttttgaacttcttggttcttcttcgctagccggtcttggtcacttgactcatggtattgtttaacgaaatcctccatgttgaatttcgaaagatctccacttgcccatagttctgcaagatgccttttaagaacactgcaatctttggtcagatgtccggtgactctatgtatatcacaatacaagctttcatctcgaacccaagtatttgaccttccttttccctgaaactccttccgaacgttattgttgaatggttgtgaaccaaacttccttggtcctcggttctcccgaggttcgaacttcttgggtggaaaagtgactgctggttttgcttgcttatttctcttcgcgaaattttccttttcatcttcgacttccatccaattgttcgctcggaataacgcatcttgaatagtatcaggtttgtgtagtgtcaaatcttctttgaatctcgaatcatgccataatcttttttcgcaaagccgatagagccgactgttgtgagatccttgggagcttcgagagtacgttcttaaacttggtgatgaaagcccgaagtgtttcgttcggcccttgagataaattccagaggtcggtatccgaaatgcttttatccataagaattaagtattgtttcaaaagtactgttgatagctcgttgaagttgctgatcgatcctggttccaactgagtgaaccacatcagggcttgtccaaagaaaagcttgtagtatcctgcatcttcatcagcttcgttcagatcaactcgcccagcaacaattagaaaagttgcgagatatcctttcggatcttccaaaccgttgtacggttcaaagttaagttttcgagaatctctgattctcaagctagcaatttgcggggtgaaaggtgttcgcctagtttcttcgatgacccggttgatatcaggttcctagcttgtagcttggtggaatttcaatctcatatctttcagtttgcggcttacttctctcatggtttcgaactggttgaagttttcttgctcgtgttgattaacgaactggttgttgtcttcgggatgcgtttctctatcttccggttggatgtccgcgtttgtaccatccgaggtcgtttgatcacttgctgcatttcgcggaagggaatttggggaaccgaagatagttcttcgaactccagaggaattgcctgcattcaaagaacgaacgcgagattgaatagtactaacattttgactgagtgatacctgggttgtttgaagtgtttcgacggttttttccacattcgaaaacttctgcgccatattcgccatagtttgctgcatggtcttgagagtttcggctagtgaagcgttggtagcatcttctccagacattgttactcacttcggaaatgtagtgtatagaaaaaatctgacgactcaagaattctccgtccccagaggcggtgccaaaatgtggatgttggattcacacactcaagtatttatttatttagttagaaggattatccttgaggacaaatgtactagaaaatagattgatgattatagagaaaactatgagttttgtaagaaaatgtgtatagtaagtttgcacaaaaatgcgtgtgtctttacatggtctttgacccataatttatattcaaagaatatatttaattctcatttacacgcaattattctctcttaaatgtatccgtttcagtcttcgaatttactattcaaatgttcaaatttgaatagactccgaacttcttgggcttcatcttccagcccacttgactctccaatccgggcaacttttgacctcgatgttcactcacctcgcggatcaatcaccccacttatactcttactcaaggaagcccataggcctttcatcttttgggcctctcccacttacgtggcaatctttgaccggtcccgagcccatggtgcgggatccaacaccaacagtctcccttatatgccattactaaagccccaaaaacttacttcccttcattcatttctttcaatcaaaaaacgggacacatgagtttctataactcaaattagtttctataactcaaattcaatacgcccacccaaaatcaattcagatcatgtgagcttcgctataaacagaaaagtcatgcttaccaccacaatcttaatcttatttatcgtcatatttattttctctctgcctctattcttattagtataatccatattcaaattcaagagacaagttcctaaagatagttgcaaaataccttctttatatccatcataaattggatttttttacagaattcataatataataaaacctctttcttcatcattataatcttcttctctattttgaccaaatcttggctatggattatcaaatttatttaaaatcattgttatttaaggattcactgtcttcgtaaaagaatcatgcctaaaaaacatcttcataaataaaatgattgttttccatattgttatatttaccatgaggaatcccaaccgaataattaaccatcaattttcttttacataagtgattcgtcaaagtttctaagaaaacatttttccatttacacacttaacacaaggacaaagagtttgctcttctcatgaaataaaatttctttttccaaaacttatataattttataatttttgacaatattctttttaaatatcattagttgtatgatcgattatttcatacatataacttcttgttgtcagaatgttgttgtccaacgacatcaatttaaacctaaaatattcaaaataatctcaaaattattgttggtatcaagtatataaaagctaaccacacatctataatacctatgcatgcataatttaaacttctcgagtagagaatgaaaccttatcctcgatgaaaactcaaataacataaaccatcgagaagataaatcaactaaacaaaatgcaaaacatgagaaaaaatcggtcaatattggcgacttggaaatttacaagtgttcaataggattttgtctcccttctatgccattaataaaaccccaaaaacttccttcacttctttcatttctctcaatcaaaaatccgaacccatgagtttccgttacccaaatccaataagctcacccgatatcaattcggatcatgtgagtttcgctggaaacagaaaaaatcatgctcaccacaacaatcttaattttattcattgtcatttttatggtctctccgcctctcttctcgttggtatctctttcaatacaaacaactagaaaaagtctcacctcatgcgagggtaaacttatagtaaaatatgtaaatatatttagttattttgaaaatatgataagtaataataattaatagaaatatctttaccaacaaaaatttaaattaaatattgtgaataagatttgttttcataaagatatcttttaggtaatatggtgagtttgttatcgaagctttagaagatctgattgcacatattattaatgtttgcattcacacatgtaagcttaaacgtgttgtctctttttgatatggttgtgggaaacacttgaacatgtgttcattgttttaggcgtatctgctgaatgacaaagaatcaatgcacaaaaccatttgtagaatgtgttcagctcaataatggaatttctcgaagtagaatcaaatcaaacggataacagataaaagagttattaaattaacaaatcaggtgatctccagtttactggattcacacatgcacgtatttaatgaaagattctgaccagaccaaaatgaattaagctacaaacctagttggtatataatcttgatccattagagaaccacaaaaaaggggattaagccaaaagacaatcaaggaagatccatttttgtccacaacaaagactgaatttaattttattgatttctctctcttacatgcactttagaatttaaatttcatctcttttgatgatttgcatgttaaacaattattatggatgaaactgttgtatttactccatataataaggttcattccatgaataaaaaataagcctttttgatatctttgttatttttaagagtgaaatttcatttcttgtcaatggtgtgtaatattagtaggtctggttaatggtgtgtaaaatcggttgatcaatgcatgatccgactttgtgcgtcatatccagggggttttgtagagagtgattttcattttcagccgtgaattcgtcttcgtgtgtcattgtaataggattttagtaaattaatcctaatacactatcatgtcgttgttgtattttaggtgtcaatccaatcaggtgtggtgcaaacatatgagatgtgatcagaagtcactaagtcaagccaagcaataacatgtttgaggtttctaacagttctaagtgaacatgcagaaaaaacagaaattctaacagaattacacaaatcactcgaccaccactggctcatgccagaagcaggatgtagttgagtaacagacaaaaaataaaacaactatactcgactgcacattctattaccaaacactgggtgtggtcaagtaagttggtgataacaggtaagaaatgcgaaaactaagcaacaagcaatgagaacgattaagcgatagcgatgaaacagagaaatcaaatagacgagaaattctgaaggatggggaaatcaaatggaatggtatcctagcctattgggatggttaacaagtgcaatcaagctatccctagaaaacaggttcaacaacagattaattcactcctgtgatagaaatcctcaagtaaagctagccaagactaattcctattaacgaaatctaactatgtgggcaataaaaaccgactgataaagtcaataaatgctctgaacagccaatcccttaagatagagacgaatatctcatgaactagtggatccaacattccatcaaactccttctaggtgcgggaatgcttcagatcaaattccaattgataagacaaaaataagcagtaaacattgataaggttcaaattaacctaagaactactctctcaaataagagatcaattgcagtatttaaggatcgatttctacaaagttcttttgttcacacaatgaattaaatatcgagattaagctagtagggaatgattgaaaataaaggagaacaaagtaaaaagacagcagattgattggttgtaaacgattaaataaagagctaggaacatggtattctcaggaacctattggttagtagatctaatgaaagctatgttgttatcgaaccattcttaaactcatactctaattatggaataaccggtggtgttccgagaaactccctatgcttatagcttagaataaccaaagaagccgagagatttttaacctaaacatgcattctaaacgagttcaattgtttaccttagtagataggtcgattcttattacacatctataaaccaggctcatcaaataatagatccaattgcagatacctatggtgggtatatctattgtctggattcaagatctagttaattactctagatctagcattaagtataatcaaagatgaataattctagagataacctagcgaagggggcgatccactaaaccatatgaatccctactgagaaactctattcctaacaagcaaactactcagacatattgaatgaaacaaaaaacatatttgagtaagaaagcatctatttactttattgaaaattgaatgaatttctgaaaacaatggatgaatagcttatgtctctgaaaatagggattgcaaagaacttgataaaaggaacttaggtctaaaccatgacatctaaaactatatataaaccgtataaaacgtctagggactaataatgcaaatagggaagtcttctggggcaaatttccacttttgtaaatttgaaagcatcatggactttgctgggtcgaaactggtgttgatcgacaccaaaagtgtgtcgatcgacactctctctgaatctggaatccgaaattgtccttagcttccttttcctttgcttttgctctaaaatgtctcctcatctccattgttgtcccattgcatagaatacctgaaaagacactaaaaagactcgagaaataacataacgactcaaaatcttatacctaaaacatagataaaatcaataaaaatagggatatatcaactcccccagacttagcttttgcttgccctcaagcaaaacacaaaagtcgaacccgtggaagaggttttgaatacaaaggaactcccatactctgtagccttttgccatgatcatccaaactaaatccacatgcctaacaagtctaatcaaatcctaaccaacatctacttctctacaagcttacacaactttttagattccatcctaagttccacaactatatccacgaggctttcatcgcttggtctcatcaaacaagctaacattcaagatctttctagactcattcatgtactataccatgataaatcgaccattctttatatatatatatttttatttttctttggtgttctttctctcccccagacttatttttttttagaaagtaaacaatggggaactcgcatactggattgacaccctcggtattttttcaacctttgtaattggtcattccaaataatgtataataatggggtcataggaaacattcctacccctatacactatccgaaattcctttcaatctctcattttctttttatttttataaggggagaggaacacattctttctatcacaattgtctcaatatcaggtatgaacaaggagtcaagatatatgaatactaaccgtttgaagaggtagaaagaagagcagtgagattagctccagccttagtggttgtgttggaaactaggatatcctcaagtttgttggtatgccatctagattttccaatagtcggattgagtcgaacctgcagtactcactaatcatgcaataatcaagagaaatatagatcatgattcctaactaaacgtttttttttttaggagaaagaaaatgactcaataaactcaaaaacgaaaataataagaatcaaaaataaaagcaatattagtaagaacctcccccagacttaaacgacattgtccccaatggcattcaaatccgaagaaggcgggataaataaatcaaaaataaaagaaaagaacagaaaaatcaaaccagtgggttgcctcccactaagcgcttgttttgagtcaatagcttgacttggcggagttcaggatgtggggggattggtggaggattgttgttgtgttcgcgccctccaaggcggtgtgtaaactgaactcagtagtgtgtcgatcgacactcttctcgtcacctgcaacaacaacaggggaaacaagttttcgaggaactctaggcttgttaacatgtgaagcagatttcgaagaatctaaggaattaatcgaaggtaaagcaagagaagaggtagaagagaacttatcaaagagggcctcaagtggtgtgggctgaagaggatgtccagaatcctctgtctatgaatcccgagggtgtcgatcgacaggagggctggtgtcgatcgacaccgatgctctacaattctcattggcgaggtgagctgatgggagcgttgtgtgtggttctgttttgggattttgagcagttagaggaggtgtgtctatgctataggcaatactactgataggcttagtgagcgctgaaccatccatgtcaaactccatctccaaataacaaactttgagagagatcctacctctcttcacatcaatcctagcaccaactgtagctaggaatgctctttcaaggataagaggatccttgggttcctactcgtagttcaggcccacaaaatgtgcagggattagggagttaccaaccttatgaggaacatcctcaagaattacttcagggattcgtttggaaaattccgcgaagaggagagtgattgtaacgactgcgtcccgcgttcataaagaggccggtttgttttaggagaaaacgagatcatggtcgaggaacggacgaaaatacttagtcggaagaacgagaaagttcaagctgaaccagctaggtgagttggacaagctggatgaactagctacctaagctaggtgagctaaaccagcaggaagagtagctagttcagctaggtgagctgatccagatgcttatttggaatgggaaaagaagattgaattggttttaaccttcaacactacaccgagattaatagggtaagagttgttgctactgaattttattactatgctttgagttggtgggatcagctagttacttcacggagacataatcaagaacttccattggaatcttggtctgaaatcaaagctattatgaggaagagctttgtccctagtcactactatcgtgagctgcatctcaagttgaggaatcttacacaagggaaccgttctgtcgaagggtactataaggaaatagagactttgatgttgcgggctgatatttctgaggatagagaagcaactatgtcaaggtttcttggggtttaaacatagatattcaagacagattggagactcaatactatgttgaaatagaagagatgttacacaaggcgattttgtttgagcagcaagttaagaggaagagttcttcacgatctagttatggttcaggaaccattgctaagcctacttaccaaagagaggagagaaccagcagctataagccgattgtcaattcaagggctgaaagtaaatcatatgctgcagttaaagatcacataggaaaagctgaaatttctacatttagagttcgtgatgttaggtgttacaaatgtcaagggaaaggacattatgctaatgaatgtccaaataagagagtcatgattctcttggataatggagaaatagagcccgaggaggagaattacctcggggttggtaagctgaattaccataggtcctctggaagttgctctgaggaaatgacttcagaaaggcaggctttggagtgtagttcgatgaactatggttccctgtaaaccgattgtgatatgatcatggacaacattaagaatagggagcatgaaccgaagcttgaacgtgagcttgtagccgaggaaggagctaagcttgtagctgaggataagcttgtagctgaggagaagcttgtagcagaggatgttcttgtcacaccgatcgttccaatgactcgttctagagctaagctattcaaccaagccatttgcgggatgcttaaccacatttgggacggaccaaatgacttgagccaagtcactacccttttggttttgattcaagctcaaggacctcatcaagatggataagtgattcatgagtgctctttttttttgcctttggttttgtcccgccgggttttccaaaggaaggtttttaatgaggcttatgttttcacttcatataatccattttgatgattcaagaccaaaacccactaaaataaagagacaattttgtggcttttgaagttgaagggtttattttgaatttcaaactatgtttttaatttctgttgtgttctaggcagccttggttggagtatgttccaagacttgcctcttcatcttcccctctccttctctttatatactcttgtattctcttttgagaacttatctttcttttaatcaaaaaccttttataagaagatcatcttgttagtgtgtatatccagcaaaattcgtagtctcttttggtgcgcatatccaaaggatctaagtctcgatatcttgaagcccttccgcaagcttctgtgatatccatcgattcattcaaatctatccatcatcacggcttcacagccaccactatcctttgctcaacttaagagtgtcgagtccttgggaggatctcatcatgtggtatcagagcacactctgaaagttgagttctctatctctatcattttgtgtcttttcatcttcagatctgtgtccgtctgtcaccttgatttaattttcataattatttcgtgcgtgctaaaattgcgaaatcaactgtcacaagattgaaacagagtctagtattttgtaaaattgtttctggaatatttgggaacgttttgataatgtttagcatccgaacaagtgaaactgtcgtaattagggttctaaggcatctgaagggtcatttcgtgtttgtttcaaaagaacaagttactggtgttgttttgttgtctctattgtagaaagaatggttgaatctaaggaggaagagactagcaacgaaacaacaaacttttggtagaagcctttgagaaaatgatggacaccaaacttaatgcttttcgccaagagtttcatgagaaactagagttggggcagactcgtcctggagaacaaaggagagttaataagccgcttgagcaaagagatgaacctacaggtcagtactatgggcataggagcacttcatctcacaaagtcaaaggagacaccatagacatgctagagaaggtagagatcttttgcaagacaatcttggaggttttaagcttaaaattccaccattccatggaaagaatgatccagatgcttatttggaatgggaaaagaagattgaattggttttcaaccttcaacactacaccgagatcaatagggtaagagttgttgctactgaattatatgactatgctttgagttggtgggatcagctagttacgtcaccgagacgtaatcaagaacttccattgtaatcttggtctcaaatcaaagctattatgaggaagagctttgtccctagtcactaccattcgtgagctgcatctcaagttgagcaatcttacacaagggaaccgttctgtcgaagagtactacaaggaaatggagactttgatgtttcgggctgatatttctgaggatagagaagcaactctgtcaaggtttcttgggggtttaaacagagatattcaagacagattggagactcaatactatgttgaaatagaagagatgttacacaaggcgattttgtttgagcagcaagttaagaggaagagttcttcacgatctagttatggttcaggaaccattgctaagcctacttaccaaagagaggagagaaccagcagctataagccgattgtcagttcaagggctgaaagtaaaccatatgctgcagttcaagatcacaaaggaaaggctgaaatttctacatttagagttcgtgatgttaggtgttacaaatgtcaagggaaaggacattatgttaatgaatgtccaaataagagagtcatgaatctcttggataatggagaaatagagcccgaggagtagaattacctcggggttggtaagctgaattaccataggtcctctggaagttgctctgaggaaatgacttcagaaaggcaggctttggagtgtagttcgatgaactatggttccctgtaaaccgattgtgatatgatcatggacaacattaagaatagggagcatgaaccgaagcttgaacgtgagcttgtagccgaggaaggagctaagcttgtagctgaggatgagcttgtagctgaggagaagcttgtagcagaggatgttcttgtcacaccgatcattccaatgactcgttctagagctgagctgtacaaccaagccatttgcgggatgcttacccacatttgggactgaccaaatgacttgagccaagtcactacccttttggttttgattcaagctcaaggacctcatcaagatggataagtgattcatgagtgctctttttccctgcctttggttttgtcccgccgggttttccaaaggaaggtttttaatgaggcttatgttttcacttcatataatccattttgatgattcaaggccaaaacccactaaaataaagagacaatttcgtggcttttgaagttgtagggtttattttgaatttcaaactatgtttttaatttttgttgtgttctaggcagccttggagtatgttccaagacttgtctcttcatcttcccttctccttctctttatatactcttgtattctcttttgagaactcatctttcttttaatcaaaaaccttttataaaaaaatcatcttgttagtgtgtatatccagcaaaatccttactctcttttggtgcgcatatccaaaggatctaagtctcgatatcttgaagcccttccgcaagcttatgtgatatccatcgattcattgaaatctatccatcatcacggcttcacagccaccactatcctttgctcaacttaaaagtgctgagttcttgggaggatctcatcatgtggtatcagagcacactctgaaagttgagttctctatctctatcattttgtgtctttcatcttcagaattgtgtccgtctgtcaccttgatttaatttttataattatttcgtacatacgaaaattgcgaaatcaactgtcacgggtttgaaacagagtctagtattttgtaaaactgtttctggaatgtttggaaacgttttgataatttttagcatccaaacaagtgaaactgtcgtaattagggttctagggcatctgaagggtcatttcgtgtttgtttcaaaagaactagtaactggtgttgttttgttgtctctattgcagaaagaatggctgaatctaaggaggaagagactagcaacaatcgaaacaacaaacttttggtagaagcctttgagaaaatgatggacaccaaacttaatgcttttcgccaagagtttcatgagaaactagagttggggtagactcgtcctggagaacaaaggagagttaatgagccgcttgagcaaagagatgaagctacaggtcagtactaagggcataggagcacttcatctcacaatagtcaaacgagacaccatagacttgctagagaaggtagagattttttacaagacaatcttggaggtcttaagcttaaaattccaccattccatgaaaatattgatccagatgcttatttggaatgggaaaagaagattgaattggttttcaaccttcaacactacaccgatatcaatagggtaagagttgttgctactgaattttatgactatgctttgagttggtgggatcagctagttacttcacggagacgtaatcaagaacttccattgaaatcttggtctgaaatcaaagctattatgaggaagagctttgtccctagtcactaccatcgtgagctgcatctcaagttgaggaatcttacacaagggaaccgttctgtcgaagagtactacaaggaaatggagactttgatgttgcggcctgatatttctaaggatagagaagtaactatgtcaaggtttcttgggggtttaaacagagatattcaagacagattggagactcaataatatgttgaaatagaagagatgttacacaaggcgattttgtttgagcagcaagttaagaggaagagttcttcacaatctagttatggttcaggaaccattgctaagcctacttaccaaagagaggagagaaccagcagctataagccgattgtcagttcaagggctgaaagtaaaccatatgctgcagttcaagatcacaaaggaaaggctgaaatttctacatttagagttcgtgatgttaggtgttacaaatgtcaagggaaaggacattatgctaatgaatgtccaaataagagagtcatgattctcttggataatggagaaatagagcccgaggagcaaattccagattcaccttcttcattgaaagaaaatgaggagctgccggctcagggtgagttgttggtagctaggagaactttgagtgtccaaacaaagaccgatgagcaaaaatagacagaaaacttgtttcacacgcgttgtcatgtgcacgggaaagtttgcaacctcatcattgatggagggagttgtacttatgtggcaagtgaaactatggtcaagaagcttggattgaaagtgcaaaaccatgcgaaaccatacgatcagacggggcatagttccccaaatctcaaagttaatatgatgagatataaagtacctaacctaaaattttgattctagagtggaattcaatacgagatggatgaacttgaagtttcatcctctcgaggaggagaagtaatgaatctcacatgaataataagtgacatatccagaagattatgttcaatctttgactactaaagatctaaaagttgtataaagcaattcttatacgaatgtgttagataaaataagttataattagttattactaaaacttcaagatttgaagtctctttgtgaatataactcacattgttaagagaatatctctaatgaagagatggtaaaacagacgcttaaagttttacgcaagtattgttgtcctgtagacacaatattttgaaagaaatttaagaactattatgaacttaaatcgagtgtttttcaaaggctaagaaaatatatgagttattgatgataagtaatactcatattctgaagtgaatataagatcttacatagctagtcaaatttaatttaatatcgtttatactagaatataaagtttcaattattgtctcgtttattgctttattaacatatgattgatatatggaagtaattttgattataagatcccattaagggagtaactgataagcaatgaatagtaaatcagaagtttaaaaaaaaaaaaaaaaaatagaagtttcaagagtatatttggcttaaccggattggttatcctggtttaatgatgatgcgaaagtattgagaattatgtggacattaggtgaaaaacaagaagattcttcctaatgatttatcaaatgttacttgctcagaaagtaatatgataatgtgatttttaccagtcaaaataatttggactttatctattcgtaagtatatacaaggagatgattatgggttgatcattcactatatgacatttagatacctaatggttataaaagatgcatcgattcaacggacgcattgactcgattgttgcatcgactagaagatcatatttatccttgttataaacctgcaacatagagtttgcgaggttactttcttgattaaagtacaagagtatttcactgtttatttattataaccattattggatatccgttgggataagtgtttaacattttgaaattcatgttcatacacaaaatggtttagtaacatcgatacgaatcaagccaatgaataattaatagttttccccatcattattggttttgggtcagataccaaaaacattttcatctaaaatctttgaatgtgaaaagtgttccaccacagcacgcaaagatgagccctcaaaggaggataagaatacatgttggatatgaatgataactaagccatcctaaaacgatttatataacgcttgttttgaagactatcatattatatagtcagctattccaacataagggggagaaagtatacagctggtaaaaaagatgaatataaatgaattatcaatgatcctcggactaaagaatgtatattaagagtccaagagataattcaattacggaatttagcgttgtaattgccatacgcatttgctaacccaaataaagtgataaagtctcatataccagttgtaaattaaatgctccagaatagaatgattgtcttgttaggaccaatttcaaactactattgagtctaaagatcgcatgaagcgtaatagaccttgattccaaatataaatatcttcgtaaaagagaaggagcacaaaattgaaaatgaccagattgaggaaataaatattttgatgatctctggaagagagtgaatgatctctagaagagacataaacatgacaaatgaaacattcaagtacttgacaatgaagagatctagctagctatgtcatgtcaaaatataatggaatcaaaagcaaatcgacgtcgtaatatgtttgcatgctatgagcagttgatattatggataaaaaggaggatcatgaaagaagtctattgaaaagtgtacacaaagtaatgattagccaaaaatggaaaagaagaaatatacatttaattataatctctagtagagatatttggactagtagtctatgcacataatgtgtaaaaccagtggaagataaatgaatctttatgtgaaagaatagtgaaattaatgagattttcacaaagataagaaatatattatgaagagatgcattctcttgtggtggatgcaatacttttaagtatctaaagtctggcaataagagatggaacactggatatgacatttatatgaaattcttgaaagatatagtctctgaaggattaattatatgagaattatgttctctagaactctactcgatcgaataaaaagaaatatgtaacatgacatataatcatataaatgtatatttatgttgagtttgttgttggggtcggatttcacccaagtaaccgagccgaccagaggaaatgcctaaggccaggaccgttggctcgggcatcatttcaaaggaccaccccgagccggactcgaaacacctcgggcatcacttcaaagagccatcccgagctggcattgaaacgcctcggacgtcactacgaagtttacccgagccgacctcaaaacgcctcgggcagacatcattcggctcaggcatacctccaagagacgagccgcccgactgcggctcgaggaccaacctgacccggctcgggagaaacttcgtatccgaggagaaaacttagaaccgatgtaagatcgaaacaccattgccggaaaacccggaaatgacactggaagatctccaaggatattgtcgaatatggaagatcccgcgaaattctccaaggataaagataatctccatcaccgaccctaagataactggaaatcttctgagaatatcccgagaggcgattcaccaaagccctatataaagtgcctcaaaggacaaacaaaaaggagacgcacaaaaacgctctcaacttcaggctatcaaaaaacgctctaactttgaaggcaaaacacttattttctatatttcaaaacacttgtacgatcaaatcaacattatctcaataataaaatcaagaacacccaccgcggtaatcaacaattctgttgttctttgagaatctcacagagatccgttctttgaaggaaccctaaatacaattttgattgtgcgagtttcgactctcacaatttggcgctagaaggaggggaatttgagatttctcttactcttagaacacagaaccaaccaaccaatccacaatggtcaacaatcaaattcccggtaacactgttgacgcagagggaaacccgatccctccaatccagacagacgctcatgaggccactgctcccgcggttctagcagaattaaggagcatgatggctcaactcaagaagaaggtagatgatcaagaacaggagaattggtctttggcgcaatagctcgaagcagctacctcccaagtacagatcaggacgactatccacacgcctggcaacacaacacggcctatccactgaaccgcgcaagaagtgggaggagaccgagcagaaccggcagcttttggaaaccaaaacacgatgaaccgagcagaggaaactgacccgcagctccctcttccccgagcagaagttgccgaggccggtcaggtcggggtctcagacgatgaagactcagaagagaacgtccgatgggctgaggaatatgctagagaacaagaaataaacgctatcaaactttccctaactaaagcggaaaccgagatgaagctcgtgagatcccagatgcataatgcagtctcctcagccccaaacatcgaccgcattctggaggagtcccataacactcctttcactcgtaggatctccaacgcggtaatttcagattcaggaaagctaaggatcttccgttccggaagggcacttgaagtctttcacaatctttgtggcccaagccaaattcagacccgacaaaagatacgccgatctctgtcacctgttcgtcgagcatttgaaaggaccagccctggatcggtcctcaagcaatattcggtgctaatcgatcttggcatgtccgacgctgacctttggtcattgtctcagcagccgaacgagccacttcgagactttctcgcaaagttccgatttaccctagccaaagtcgaaggaatcaatgatgtagcgactctttctggtctgaaaaaacgttgtggtacaagtctgaatttcgaaaggagttaaacttatccaaaccacaaacaatctgggatgccttgcaccaagcctcggattatgtttcccatgtggaggaaatggaactgctatcaaaaaggcacgagccgccgaagcaaacgcctcgtagcgaaaaatcccaacctagcgctccaaaccacaaaaaggtcgctcaaggcggaacattcgtaccccatgaaggacgaaatttctctggagcccacaattatcaagctgatacgccctaaggccgaggtcgcggacgagaatcctatacctggacgaaggaccaaccagtgggaaacgagcaggaatactgcgaattacataagagctacggccatcatacttccagatgttgtagcctcggggcaatgttggcagctaaattcctagccagagaaataggtggaggcctaaccatcgaggatttagaagcggagaaagccaaaaccgagcaggtcaatgttgtggcaaatcctaaatagacagcccccgcaacgaacctcgaatgatccaagagaggcagaggcaatcgcgaggcagatgacgacgaaccagaagctgctcggggaagaatcttcacaattttaggagattcagctttctgtcaagacacagcggcatcaatcaaagcttatcagaggaaggccgactcaaatcgcaactggacgcgactgtttaaaggacaagatgacgaagtgacttttcacgagagcaacactaacggcttggaccgtccgcttaatgattccttggacattacactaattattggcgattttaacgtcgaaagagttctggtcgacacggggagcacactagacatcatttttctaacgaccctacgagaaatgaaggtcgagatgacgcaaattgtaccgactccgcgacctatgctcgggttctctggggaaaccaccatgaccctcggtaccatcaagttactagtccgacccaaggggataaccagccgaccgtttataacacaattatcggcacgccatggttaaatcaattctgagccgtcgcctcaacgtatcatctctgcgtgaagtttcccacaagcaacagcgtgaagaccatctggggaaatcagaaaaacgcccgaatttgcttcatggcagcacacaagctcagaaaccccgtcaccgagtcaacaaccgacgcaaatcacaagaaggctaagctgggccaagccaaagagaaagcaatctccgagcagttataggagctaaagattgaggaggctcgagagtcaacataaccagtccctgacccggtaatctccatctgccttgatgacgaaaaacccgaacgatgcgtagaaattggcggagacctaggcaaagaattaacagtctagctaacttctttcctcagagaaaacgtcaatacattcgcgtggtccccggaagacttgcccgaagtaagcgtcgaaattgtagcacacgaactcaacgtccacccaacgtttaaacctgttaagcagaaggggagaaaattatgtagggagcgagcagaagctgtgaaagccgaggtagaggaactgttaagcttcggctccatcaccgaggcaaattaccccgactgactcacaaatctaatcgtagtaaaagagaaaaacggcaaatggagagtctgcctgcccaaatgacagtttcccattgccgcatatcgatcgcctcgtggaatcaacctctggaaactaattgctatcattcatggacgctttcgctcgctacaaccaaatcatgatgaaccccgacgatcaagagaaaaccgctttctacacagaacgaggaatgttttgctaccgagtgatgccattcggacataaaaacaccggggcaccttatcaacccttcgtcaacaaaatcttcgcattacagatcgggaagacaaaggaagtttacatcgacgacatgctgataaaatccatggaagaggaagaacacatatcccatttgcgtgaatgtttccagtagctaaacctctataacgtcaaccttaacccagccaagtaccgcttcggggtaagatcaggtgaattcctcgaatatctagtcacgcatcgcggcatcgaggcaaatccgaagcaaatcgaggcgttattaggattggcatcaccttaaaacaagcgagaattgcatcgcctaactggaagagttgcagcccttaaccgattcatctctcaatctaccgacaaatgcttggctttttacgatgtgctccgggggaacaaaaaattcgaatggacaacccgatgcgaagaggcttttcaggaactcaagaagtacctggcgaccccaccaatcctcgcaaaacccgtaatcggggaaccactctacttatatgttgtcattgtcggatactgcagtcaggggagtgttagttcgagaagacagaggcgagcagaaaccgattttttacgtctcgcagacattcaccagcgcggagtatcgctacccgtaaatggaaaaactcgccctagtagtcgtaatgtccgctcggaaactgcgttcctactttcaatcccattccattgtagtaatgggatccatgccgctctgcagtgtcttacacaatccaagccaatcaggacgcctggctaaatgggaaatcgagctcatcgaatatgccatcgagtatcggaactacccacaaaggaggcccgggagaatccgctcgatacaacttggctattgcatgtagatagctcgtcatcaaagcaaggatcgggcgtgggcatccgtctcacttcgcatacgggagaggttctcgaacaatcattcaaattaaacttcgaggctaccaacaacgtggtcgagtacgaagcgctcgtagccggactcaatttttgtgactctcagctcgtcgcaaatcaattcaaaggagaatacacggctcgggacaaaagaatggaagcctatctggctcatgtacaaaatctggcgaagcatttagacgaattcgagttaacgaggatccctcgaggtgaaaatacatcggccgacaccctagctgctctggcctcaacaactgacccaagcctgagatgagtcattccggtagagtttatcgagaagccaagtatcaagctcggcaaaaacgaacttgtcttccacatacaagttggcgcggattgcgacgacgcttcggatgatagcccagacctgggttgcgactccgaatggatagatcccatcaaaagctacatattcgaagggaaagtgccctcagacaaatgggaagcttagaaacttaaagctcagactgcacgcttcgttctggtcgaggagaaactctacaagtggcgactatccgtacccttaatgacttgtgtggaaaaagaagcggctcgcaaagtcatgaaagaagttcacggaggctcgtgtggaaatcattccgggggaagagccttaaccatcaagataaaacgccacggtttcttctagccgacgatgatcaaagattgcaaaaaattctccaaacgatgcgaaaaatgtcaaaggcacgcgccaacgatccatcaaccggccgagctcttgtcatcaatcgcctcgccatatccattcatgtgttggtcgatggacataatcggacctatgcatgcctcgaagcagaaaaagttagttctcgtcttaaccaattatttctctaagtcgatagaggccgaatcttatgccagcatcaaggacgctcaagtcgagagcttcgtgtggaaacatatcttatgtggccacgggataccttacgagattgttatagataacggctcaccatttatatcaacccacttccaaggcttctgcgataaatggggaattcgacttagcaaatcaacaccgcaatatccccaaggaaacagccaagccgaggccgcaaacaaaacaatcctcgatggtttgaagaaacggttcgccgctaaaaagggctcgtggtccgacgaactcgacggtgttctatggtcgcatctgacgataccgcgtcgagccacgggagaaaccccattcgccttagtctacggaacggaatgtgtaattccagccgaaatgacggtaccgagcctgctgcgaagcctatctcctgagcacgaaccagataatactcgaaggttactcgacgaactcgatctaatcaatgaacgaagagattcagccttggtgtgaatataaaattatcagaatgaaatggctcggtattacaattcgaacgtccgacagcgaattttcaagaaggggaccgagttctccgaaaagtcttccaaaacaccgctgaaccgaacgctgggaagctaggggcgaatcgggaaggaccatacttgatctctaagttcgtccgacccggagtatatgaacttgccgacttaagcggcaaagccgttccaagatcctggaacgcaatgcacctaaggaaatactacaactaaatccgaggtgactaaatttgaactacgaggtgtcttgatccctaaaaagagtatgtaggcagctcgtcctcggacgagtttagctaccccccccattaaaaaggggggagtgggtccgtatacccattctcccatttattattttgtaatttttaacttccgcataaataataattcgattcacgattttttgaacgcttcggctaatacgatgagcgacggctcggagcgcctcgtctttttcccaacttgttggccgcctccatgttagtccgcatggccaaatcatacgaatgaaccatccggttcatcgaggtaacaacctggagagcagattagagacaaattacgagatgagaacttagaaacaacgcacagacgagaaggaaaagggttacacgtacctgcaagaagtgagatgccgtctcggcatacttccgcgactctaagagagtatctggcggagggagtagaggacccgaacagcccccgagacggtttgcaaaggcgatccgatcttcaaagattgggagctccttctccgcctcgtcgtttgagagcttcttccttttgctcttcttcttcttggacgaggagtcatccgtccgaacacgcttccctgctgccttatcagtcgccggcaacgcaacaaccgcctcggatacaggcgcatcagcgggcagataggccacccgagcctcagtagacgccaactcaatcggcattgtcgcctcgggtgtaggcgcatcagcgggaaaagtcgcgtcgggagaagcatgcagtgagatcaaccccgcctcggcaagatgcttctcctccatcaggcgcctctccttgtcctcctttttcttcgcgtaaacctccctcaaagtaagcttggtcgactgcatgtctacgaagaattgggtacgatgatttgaggactccaagctggaaggacaagaaacaccgtgaagtagacgcaacgccaaaagaaaatcgtctggaattggctcgaggaatttgagggtgcgttttgcaaccaaggaaaacaacagtcagaaaaaatcatgaaatcgcgtcgggcacaaacagaatgttagctataactacctaagttcctcatctcgtcaaaaccgtcccaaggagatcgtcgtgaatatcatcttcaagggccacaaagagaaagtgataggtatacggctcatctttgctcgggtacccgtcaataaccttcctacccgtcaagtaccgatacactttggatttaagaacctgccggatctcaaggagatttctcagatgagcaagcgtgatgtcggtctcagattcataactccgaaccagaatcccgagcaaatgtgtcaaggatcgcgtcgtaatctgggagagggcgatctggtacgatgtcacgtaccccaaaaccagcctcgggaccggaagccatagaaagcaaaaatagaaaaatcccccatacaaagtataggagcccgtacggggattgtcggctcgctcatcggggctcggcacacgtagagtgacctcacctagattgaatcgaggcctcagatccgaaagcaaccgctcggtgcacaaagtcgagccaagaggatttggcactatcgccctcttgcctttcttcttctttttcttctcggctttctcaaaagccctctgttcgttgagacgctgaatatcctccgtctcattcgggccgaaataaagaaagtcctcgatctttgttgaaggcatcgtcctccgaggacgtccaaaccgcccttcgtttgtggatgggggggggggaaggtcatcttgatggttcgaatcactggagtcgtagagagaggcgctcggggtggaaggagatttagaatccattttcggcttggagacgtctaactagacaaggaaacaacaaaatgttctaaccggcaaaatcaaatatttaaaaagaaatggcggaacttcacagtaaaaagagaaaacaataagaatatcaagatcagagagaatgaggcaaacctttattttttcatcaaaaacttcaaatgagaaattctcaaggggatggctcgctatatataagatttatgaaggcgcgtcgggtccgcaataaatgatgaaacgtgttagaagcgcgtgggctcggctgaaagagaaacgtttgcgtgatcctcgggaataagcaagaaacgtttctgcttcttaaaaaagagtctgctgcatgcaacagaagtttgaccgtccaggaaggtgaagcgacgaagtcacgacttgggaagacgaatagtcggcttggatatccattcataaagctcatcgcctctcccgccaaagtcaataagctggggggcaaactgttggggtcggatttcacccaagtaaccgagccgaccagaggaaatgcctaaggccaggaccgttggctcgggcatcatttcaaaggaccaccccgagcgggactcaaaacacctcgggcatcacttcaaagagccatcccgagctggcattgaaactcctcagacgtcactacgaagtttacccgagccggcctcgaaacgcctcatgcagacatcattcggctcatgcatacctccaggcgacgagccgcctgactgcggctcgaggaccaacctgacccggctcgggagaaacttcgtatccgaggagaaaacttagaaccgatgtaagatcgaaacaccattcccggaaaacccggaaatgacactggaagatctcctaggatattgtcgaatatggaagatcctgcaaaattctccaaggataaagataatctccatcaccgactctaagataattggaaatcttccgagaatatcgcgagaggcgattcaccaaagccctatataaagcgcctcaaaggacaaacaaagaggagacgcacaaaaacgctctcaacttcaggctatcaaaaaacgctttgactttgaaggcaaaacacttattatctatatttcgaaacacttgtacgatcaaatcaacattatctcaataataaaatcaagaacaccatcccaggtaatcaacaattctgttgttctttgagaatatcacagagatccgttctttgaaggaaccctaaatacaatttcgattgtgcgagtttcgactctcacatttgtcaaaatatatttatcaaactaatatttgttttgaaaatcattaaaactcctacatagttatcataagtaatacgatggcaataatctatgataaaatatcacaagataatgatatttgtaagcctatatgaaaaccatataattttgatcattaagattatggttattaattccaacgagatactgtatttgattgaaaatcatcttctgaagaagatgtttccgagggggagattgaatgatgtgcgtagatgtaccctttttccttatcatagtttttattccacatgatttttctatgacaaggtttttaaggagacattaaagagaacggaaataatacacttgatgaatattaggaaattctatcaatcatccaaatgaatattatacactaatgatatttagagaaataaataagatggtcaagatgaattatcagaaagattgatgagcagcagaagaatggcgatgtactttatccagaaattcgttcaacagacttattctcaaatattgtttattctctcccacatcatctaatcatgtagagattttagcaattcatgaagatagccgcgaatgtgtacaagaagactttggtatgtatgcaggaaaaaagactccaacaattatgtacgacgacaatgcagcatgcatcgcacaactcaaagacggatacatcaaaggcaatagaacaaagcacatcctaccaaaattcatcttcacacacgatctacaaaagagcggcgatgtacgagttctacagatccgttcgaatgataatctggctgacttcttcaccaaggcgctatctactgctactttcaagaagttagtctatcgtagcggattacgctgtttcaaagatctcgacgaatatactcataagggggtgtaattgtgtgttgcactctttttcccataaccatggtttttcccattgggttttcctggtaaagtttttaatgaggcaacatttcaaatattttaggagttatggtactataatggtcatcaagggggagtgttatgaataatagatggatgcccattataaggcccatcatctagatgtctctagggttttacctttctcttgtactcctatataaaggaccctttattcgatggaataacacactcatttcttctatctttttctcttgttacaacaatgttgttattttcgtactcacgatctcacaacaaaaataaaattccaattttacccttaccatctcaattaactattaaattttagatgatataatattaattttataattttggataaaaattaattttattaacattttaatttattgtgtctaaaattttaaaatttcgtttttcttataattattttattttaaaatttaacataaaaattagagaaaattaaaaatattttaaaatggccggtaaacattgtttgtggtgagaaactctttattcgattttatgttcttcacgaatcaaactagtttcgacaaactctcaatcaaaatcccatcgtctttctcaagatttatcaattcacaaaaatggctaattttggttttagttgcaaaatagccaatctcaacccgaatctcaacgaataagattaatcttcgattctagattttctcaaagagcaaacgtctctttgatattgcaacgataaaataagattgtaaaatgactattttaaaatatttttgatttgctctaatttttatgttcaattttaaaataaaataattataataaaattaaaattttaaatttttagacaccataaactaaaatgttaataattttaatttttatccaaaattataatttttttatcatatcatctaaaaattaatagttaattgagatggtaatggtaaaattggaattttatttttgttgtgagatcgtgagtatgaaaataacaatatttaattgtttagatattaaattgcataattttattatttcgtgtatttatcttccaagcaaaaacaattgggtattaaacgtccaaataaaaattagttgaggtttgtttttgggttttttccctctataatacttttgcttaacctaatagtttcttgcttaataacaaaattccatacatattaggccttgttcccttctggcccaatggccttttctccaacttttgtgacgaatttgcgtcgaagtagcgacgtcgctcgcaattaaattacgggaaaacacgcgttaaataattgaccaaaatttaggtcattcttatttatgtttgggaaacttctcagtttcccttccatttctttctcttctcttctcagtttctctttctcttctcttcgattcgagaaacttcggatcttctgttggcgaaagcatcatcgtcgtctgcttcgttcaatcaattggcttctcatctgttttctttctttctagagattttcaagctcacggtttgtctcttcttctctaaaggtgtttttcgatcaatgggttttgttgaacaataagagttagggtttgtttgtttgcatgatattagggttgtgaaattgaaatcgccctctattatctatttttgctggaaatttatgttctttggtgctaattttatggtcaatcgattgtcttcattgagcttttttttgttttatgtctaggcttctttttctggttatggattgagagatggaacattaatattttttctttttgttgtttaacgctttgttttaagtttgattcataggtttatatgtctcttttgtaacttgtttgtttaagattatgcgttttgttcaatatctctacctgtttccttctcttctgcagtttttgcagctgctataaaaatctaaacgagcacaaggactgtaagttatacaactacatagtactttccttgagttatataatttcccttgagatatattgtcagtaacttacatagcattgtgttcatacttgtaggtgagaagaagatcagttttcttcaaggtaagatcacattgatggagatgttttgtcaatatatcttatgaaactctgttttgctacttcttctattagcaaccttggatcttcatttactttctctatctcacgtttggatcaacagttttaaggtttatgattcctgcgtaatttattgcatatcttaaataatgatttctactgctaattcctttgacattattctgcgtcaactgggattttgtattctttttttctgtaccaagcttagcttaatcgttatgcatttgctataatatctatttccacattttgttttagacaaagtggtcattgatagattgtcttcctcacttgtgaattgtgatggaacttagtaatcttttgattgcttcacctgccaagtctcaggattcgttttttttttaatcattcaagatttttttcgtgagacatacttatgttgcttaatgttattattatatccttcaaagtgttgatatacaatatgtctaggttaagtaagtggaaaagtaagtggaaggaaatagatgataaagcaatgcatatgtggatggatcctaaggtatggaagggctttgaagttttttggcttgatccatagtctgaaaataaaagtggtaagtgttcaaaatctcgcaacactagtgtcgccagtcatggtccgagtagacacacctcaggtcaaaagacttatgctaaacgagcattagaaagtgtaagtaatttatgcttttcacttttttctcattttcctagtttcatgatgatgattactattttaactttcatgttaggctgagaagaatggaggtcaactccctccaattgtccagaccatggagcagactcacaagagaaataatggagaattcattgatggttttgtaaagcaaatttgcaaggaagtttcagccaagatcttagagcaagagtctcagctttctccgggtgattctggccagcctggtggcttatcaacagctgcaaagaatcaaatcctgttcgaggtattatttttgaactgtctcagcctataaaactgcaacatgctagttagttcttcacgttttcccttttttcaatcttgtttgagttttgaagtcttattcaattgcatcattgaatataagttgcatcattgaatcttttgagctattaatattgattgtttgatgatgagtttggtgaatttaaagtatagttctttgcaatgttatgtggtttgtgatatgcatatgtttttgtttgatttttcaggctactccaaagaataaaaagggacggtattatggtggtggttctattccaattatcccatctgcttcggtcgatcgacatgctcgggatgattttgttgatcaggagacctatgaagcggagaagaaacggaacgacaaacttctaaaactacaactctaccgacaacacttaaagctcaaagacctacaacacaaggagcacaagagcaaacagaggaaccacatgaccaaccacaatccgaagtagcagcagctcagccatctcctcaagcataatatgatccaattattttgctttcttttgttgcattcaaaatctaactatttctatgcttttctttcttagaatatcaaacaatttcagttttattcagaattcatatttacttttgatttcttttttttttcgatatacttttaatgttaaattcaaacaaaaaatccaatttgtgaaactgggtttaaattggattcttgaactatccctggcaaattcctcactctacacgacacacttacttgcatattcatcgcaacattgcatgtactttgcgacgtttatattgtgtaggctctacgagggacctgtttcttcgcaacagtgacgaaacaattgcgacgaattttgttttgcgacaagagattcacgacgaattcaaatgcgtcgcaaagtacatgcaaagtgatatttacgacgcatccgcgaggaggactacctaccttgcaaatgacctgttttcttgtagtgattgtgagatgtgaagataaagatacgtaggcgtggtttgcgagaaagctgaaggttgaccttggattgcaattgggagataacctaaccatcatctcaaataagcaaaaagttttgtttttaatgaaaaaatctattagattataattgaataaccatcatctgtttttaataaatgtttatggagggaattgtgaatgtaattgcatccgagcttctaagtgtggataatagaatttgttcgagacatatatatgcaaattggaaaaagaattatgtatcttcagagtacaaagtcatgttctgatatgttgcttatagttacaatacgagggaatttgattataaagaagaagttattactaaactatgatcctaaagcatatgaggccttgttgaatacacaacctaagacatggtcacgtgcatacttcaatctgggttctcaatgcatggatgttcacaaagatatttcagaaagttttaacaagacaatcagagaagcaaggttaaagccaatcatcaatctattgaaaaactctaagaaggcaaataatggagaggatctctcggaggttaaaacagtgtttggcatcggatgtccagttttcacttataacacttaaaagtgttggagaagtcgagggttgatgagaggtattgtgctactttatgtagtactgccactttgtatgaggttgttgagtttgagagtgggtatactgtgagcttctcaaaccatcaatatgcatgtcgtcggtgagatctcacaggtaagtgattatattcatgtttttcttgttttcgaaatatgatttttctcacttttcatattgtttaaggtattccttgtatgcatgctttaactatcataaatgacaatgaggacgatgttaacaagtatgttatctcaatattattactcaaatatttagacgggaacatatacaagaaatatttatcctgttaatgaagtgaaactttggggaaaaacagggagaatacccattcgagtgcgtaattttcgcaggccaccaagaagagcaaagagttacaaaaggaagaaagagcataatgaatctaagaccaactctggaaattcaataagacatgggggaatcatacattgttcaaattattgcgaagcaagctataacaaagccaaatacaaaaatacgaagaacccagttcagcgtaaggaaaaaagagattgacctcctaagaatcctcaagaggtaatatattgtgatgtctcctatttagatcatttttacatatacagtctcttatcttggtgtcatttcctctatagataccagttcgtaggcctccaagatcagcatgtagtacaaatccaaataaaacttctaaaaagcatcaaatacagcttaaggataatctcatcgactttcaaaaaagaaaaaaaaaaacaatgcaattgctagtgtccgtaaaccatcacatattggtgaatcaactatatcaatgcttatagctgcttcaagttctcctcacctatcaattttatggcgtaagaattttattaggttatgattctttaaccgtatttcaattatatattatcttttatttttatgtgaattctcgttttaatacacatgtgaaattaaggtaaaaactaacgacaaaaaaaactcatttaaagggtgtttcttattttgaaacaaagttaatgttgactgttagtcaaccttaggttcggaacaaatttggagatttggatgtttatgttgataaatttaactacatagaggttttaaatgggaataaaaaaaagtttgatgttttagttaggaaaatattttgatttggaggtttgttttgggattttccttataataaaatctttttcttcactagtatactcttcttctacattttgaccaaatatttgctatggattatcaaatgcatctaaaatcattattatttaaggactcattgtctccttataagactcaagcctaataaaatgtcataagcaaaatgattgtttgccatattttaatcttcgccgtaagaaacccaaaccgaatagttaaccaatcaatcttctgttatataagtgattcaaggtcttctaaaaaaacatttttccattttcacacttaacacaaagaaaaagagttttctttcttcttaaataaaagtttactcttttcaaatcttatataattttctaattcttgataatatttgttttaaatatcggtagttgtatgatcgatacttccatacatataacatcttgctaccagaaagttgttgtctaacgacatcaagttaaacctaaattattgaaaataatcttaaaattctcaaaatgatgatggtatcaaggatataaaaaatcaaactatgcatctataatacttatgcatgcaaaattaaaacttatcaagtaatctttgaccatcttagactacaaaagtagctaataaaagcttaccctcattgaaaactcaaatcacataaaccatcgagacaataaatcaactaaaacaaaatgtagaagatgagaaaatatcgatcaacattgaagacttggaaatctacaaatgttcaataggatatagtctcctttatatgccattactaaaaccccaaaaacttcctccatttcattcatttctcttgtgggttttatttttggagagctcctagaagtaagaaataagattacgatcgcttgtaatgatctggagaggaattacaaaccaatattcgatatcattgatgataaaatgaaagggagacttgattcttgtttgcacatgagcgcctttgtattgaacccattctacttttacgaagacgcaacgatcgagcatgattaggtgttaattgatggatttatgaattgtgtggggactttttaccatggtgagtttgaaatacaagctaaagtcgtcaatgataattttaataattataagatgaagtctggagattttgggagagctatagctttgagaggatgtcaacaaaatgatgagaaatttgaaccaggtattttcttgattttaataaccttaatgattatttgatcatccacgttttttgatttagtttatattttagggaattggtggtcgttatatggttgtcatgtgcttactttgcaaagattagcaataaagattttctctttaacacctagatcatctagttgtgaacgtaattggagtgcttttgaaagggtaagtttcttgcttttcttttatcttaaatattctttttgattttttgaaggatagctactgaattataagactttatgttgtagattcatacatggaaaaggaatatactagatgttaatcgacttaataatctagtatatgtccaattcaatgccaagttgttcagcaagcaacaaattatcaaagaaaaaataataatgtgatttaagatgataaagatggaagaaatgcagaagaatagtttgtagagccaagcgaaagagatgaagagcctaatggtgagcctgtttaccaaactccaaatgataaacctagagaagatattgaatctcatgaagagcatgatatcactattaatattgaatttgaatcagataatgagcaggtggtgaatgtagatgtgatcagaggagaagaagtttaggatttaagattacttttgggttttcaaagatttaagattactcttagttttcattaggttaagccttacgttaagttttatttaggagaattttgcattattttgtagcttaggtttcaacgagatcatttagatcttaatcttacctttatcattatacatttgttgaactttatcatggatattggaatttatagtctattataaaagttttaaaataataaataaataaaattaaataaaaatacattaacgcctaggctccgcctcggccctgattaatcgctctaggcgctagactcaggttaaccacctagctaccgcctacccattttttaacactggttctaatgaccttctttatatccatcataaattggattttttacagcattcataatataataaaacctttttcttcatcattataatcttcttctatttttaaccaaatcttggctatggattatcaaattcatctaaaaccattgttatttaaggattcactgttttcgtataagactcaagcctaaaaacgtagcaaaatgattgtttgctatattctaattttcaccatgaggaacctaaactgtatagttacccatcaatcttcttttatgtaagtgatttgtcaaagtcttctaaaaaaataatattttattttcacacttaatacaaagacaaagagttagctttctcaataaataaaagtttactctttccaaatcttatataattttctacttcttgacaatattcgttttaaatatcattacttgtatgatagattctttcaaacatataacgtattttagctaaaatattgatgtccaataacatcaagttaaacctaaaatattgaaaataatctcaaaattctaaaaattgttgttggtataaacgatataaaatctaaatatgcatctatcatacctatgcattcaaaatttaaacttctcaagtaatctttgataatcttagcctacaaaagtagataatgaaagcttaccctcattgaaaactcaaatcacattaaccatcgagaagatgaataacctaaacaaaatgcagaagatgagaaaatatcagtcaacattggcgacttggaaatttacaattgttcagtaggatatagtctcccttatatgccattactaaaacctttaaaacttctttcacttaattcatttctttcaatcaaaaaccagaacctttcatgaggttccgtgactcaaattcaataaggccacccggtataaattcagatcatgtgagcttcgctataaacagaaaaatcatgctcaccaccacaatatttatcttattcatcgttatttttattgtctctccacctctatttttgctgataaaatccatattcaaactcatgaaacaaactgttaaacatagttgcaaaagatcttcatcatatccattataaattgattttttttttacagcattcataatatattaaaataattttattcatcattatgctcttcttttatattttgaacaaagcttggctatggattatcaacttcatctaaaatcatagttatttaaggactcactgtcttcgtataagactcaggcctaaaaacatcttcataagcaaaatgattgtttgctatattataatcttcgtcatgaggaacccaaactgaatagttaaccgtcaatcttcttttctataaatgatttgtcaaggtcttttaagaaattgttttaaattttcacatttaacacaaagacaaagaaataaaagtttactctttccaaatcttatataattttcttattcttgccaatattcgttttaaataacatctttttggtaaaatattgttgtctaacaacatcaagttaaacataaaatattaaaagaatctcaaaattcaaaaaattgttgttggtatcaagaacataaaatctaactatgcatctattatacctatgcatgcataatttaaaattctcaagtaatgtttgaccatcttaaactacaaaagtagataatgaaaggttatcctcgttgaaaactcaaatcacataaaccatcgagaagataaatcaactaaacaataagcaacatataagaaaatattggtcaacatcggcgacttcaaaatctacaagtgttcaatattatatagtctctcttagatgtcattacggaaacctaaaaaaagtatttcattttattcatttctctcaataaaaaactcagaacccatgagtttccaagatccaaatccaataagctcacccgatatcaattcagatcatgtgaataaacaaaaacaatcatgctcaccaccataattttagtcttattcatcgtcatttttatggtctatccgcctctattctctttggtataatccatattcaaactcatgacacaagttgctaagcattgttgcaagagatcttctttatatctatcacaaattggattttttttgcagcattcataaaataataaacatttttcttcaaaattatactttttctatattttaaccaaatcttggctatagattttcaacatctaaaatatttgttatttaaggactcactgtctccatataagactttagcataagaacatctttataagcaaaatggttgtttgtcatattataatcttcgccatgaggaacccaaaccgaatagttaaccatcaatccttatttatataagtgattcatcaaattcttctaaaaaaacattgttttattttcacacttaacacaaagacaaagagtttgctttctcataaaataaattttgaatatttccaaatcttatataattttctaattcttgacaatattcgttttaaatatcattagttgtatgatcgattctttcgtaaatataacgtcttgttgctagaatgttgttgtctaacaacatcaagttaaacctaaaatatttaaaataatctcaaaattctcaaaatgatgtcggtatcaaggatatataatctaaatatgcatctataatacctatgcattcaaaatttaaacttctcaagtaatctttgaccatcttagaccacaaaagtaggtaatgaaagattatcctcattgaaaactcaaatcacataaaccatcgagaagataaatcaactaaacaaaatgcagaagatgagaaaatatcggtcaacattggcgacttggaaatctacaaatggtcaataggatatagtctcccttatatgccattactaaagccccaaaaacttacttcacttcattcatttctctcaatcaaaaatccaaacccatgagtttccgtgacccaaatccaataagttcacccgatatcaattcagatcatgtgagtttcgctggaaacagaaaaaatcatgctcaccacaacaatcttaattttattcatcgtcatttttatggtctctccgcctctcttttcgttggtatctctttcaatacaaacaactagaaaaagtctcacctgatacgtgggtaaacttatagtaaaatatgtaaatacatttagttattttgaaaatatataagtaataataattaatagaaatatcttcaccaacaaaaatttaatttaaatattgtgaataaaatttattttcataaagatatcttttaggtaatatgggtgagtttgttatcgaagctttagaagatttgattgcacatattattaatgtttgcattcacacatgtaagcttaaacgtgttgtctctttttgatatggttatgggaaacacttgaacatgtgttcattgttttaggcgtatctgctgaatgacgaagaatcaatgcacaaaaccacttgtagaatgtgctcagctcaatattggaatttttcgaagtaaaatcaaatcaaacggataacagatgaaagagttattaaatttacaaatcaggtgatctccagtttactggattcagacatgcacatatttaatgaaagattctgaccagaccaaaatgaattaagctacaaacctagttggtatataatcttgatccattagagaagcacaaaaaagggtattaagccaaaaaagaatcaaggaagatccatttttgtccacaacaaagactgaatttaattttgttgatttctctctcttacatgcactttagaatttaaatttcatctcttttgatgatttgcatgttaaacaattattatggatgaaactgttgtatttactccatataataaggttcattccatgaataaaaaataagcctttttgatatctttgttatttttaagagtgaaatttcatttcttgtcaatggtgtgtaatattagtaggtctggttaatggtgtgtaaaatcggttgatcaatgcatgatccgactttgtgcgtcatatccagggggttttgtagagagtgattttcattttcagcagtgaattcgttttcgtgtgtcattgataataggattttagtaaattaatcctaatacactatcatgtcgttgtagtattttaggtgtcaatccaatcaggtgtgctgcaaacatatgagatgtgatcagaagtcactaagtcaagccaagcaataacatttttgaggtttctaacagtcctaagtgaacatgtaggaaaaacagaaattctaacagaattacacaaatcagtcgaccaccagtggctcatgccaggagcaggatgtggtcgagtaacaggcaaaaaataaaacaactatactcgactgcacattctattaccaaacactgggtgtggtcgagtaagtttgtgataacatgtaagaaatgcgaaaactaagcaacaagcaatgagaacgattaagcgatagcgatgaaacagagaaatcaaatagacgagaaattccgaaggatggggaaatcaaatggaatggtatcctagcctattgggatggttaacaagcgcaatcaagctatccctagacaacaggttcaacaacagattaattcactcctgtgatagaaatcctcaagtaaagctagccaagaataattcctattaacggaatctaactatgtgggcaataagaaccgactgataaagtcaataaatactctgaacggccaatcccttaagatagagacgaatatcttaggaactagtggatccaacattccatcgaactccttctgggtgcgggaatgcttcagatcgaattccaattgataagaaaaaaataagcagtaaacactaataaggttcaaattaacctaagaactactctctcaaataagagatcaattgcagtatttaaggatcgatttctacaaagttcttttgttcccacaatgaattaaataccgagattaagctagtagggaatgattgaaaataaaggagaacaaagtaaaaagacagcagattgattggttgtaaatgattaaataaagagctaggaacatggtattctcaggaacctattggttagtagatctaatgaaagctatgttgttatcgaacaattcttaaactcaaactctaattatggaacaatcggtggtgttccgagaaactccctatgcttatagctaagaataaccggagaagccgagagatttttaacctaaacatgcattctaaacgagttcaattgttcaccttagtagataggccgattcttattacacacctataaaccaggctcatcaaataaaagatccaactacagatacctatggtgggcatatctattgtctggattcaagatctagttaattactctagatctagcattaagtataatcaaagatgaagaattctacagataacctagcaaagggggcgatctactaaaccatatgaatccctactgagaaactctattcctaacaagcaaactactcagacatattggatgaaacaaaaaacataattgagtaagaaagcataaacacatcaaataagataagagtaagaaaggatatcttcactgtattgaaaaaaactgaataaatctctgaaaacaatggatgaattgcttatgtctttgaaaatagggattgcaaagatcttgataaaaggaacttaggtctaaaccatgacctctaaaactatatataaaccttataaaacgtccaaggactaataatgcatatagggaagtcttctggagcaaatttccacttctgtaaatttgaaagcgtcacggactttgctgagccgaaactggtgtcgatcgacaccaggagtgtgtcgatcgacactctctctgaatccggaatccgaaatcgtccttaccttccttttctttaggttttgctccaaaatgtctcctcatctccattgttgtcccattgcatagataacctgaaacgaccctaaaaagactcgagaaataacataaagactaaaaattttatacctaaaacatagataaaatcagtaaaaatagggatatatcaaacacaactagtccagaagggattcaatcaattctaaaattaaccattctacagactacggatcccacaaccattctatccatccttaagaactctaagtcactactcagacaacatgctaaaagacataatcgcaaataaataagtatattgcataactaaaaagataaagagtagagaaacaagatgatagacgaaatcaaatgcggaatctcaataactcggaaaaatcttgaattacaagttgcagaagcaaagcggcgcagctagagtaaactaggtaaaacataatagaaaactgaaccaaaaagctggatgtcgactagatgtcttaggacaaaacccttaaaaacacctatttatacaaaacgaaatgaaatgataggagatgggccgggaatccaatcggccgacccatagagtgataatgggccaagatggaccttgtgatcgaatgaagctcctgaccacctccaaacacatcttcttctcctctactcttccttatggttagcttgtctggttgagtgcggatttgagaagactctaaagatgccatgaggtgcttggtcgagtgatgcagctggatggttatttatgttacgacctttgggtcgagtgtggtgatcgagtggatgctcgagtggaggtcaggtggtgtgacaagatgttactcaacctcgtggtcgagtggtgtcatcgagtgaccttgactacgggtactcgaccacagtgtcgagtggatggaagaatggctccaatgttactcgaccagagggtcaagtatgtgagaagaatggccccaatgttactcgaccaggtggtcgagtatgtggcttctgattctggctcgcttcttacaatttgctcgctaacagctccaaatcacctgaaaacaactctaaaatgcactatgtatacaaagctatccaaatcatgcaaagtgatacggttcaaattaccctaagtactactctctgaaataagagatcaagtgcagtatttaaggatcgatttccacaaacttcttttgttcaaacaatgagttgaatgtcgagattaagttagcaggtgatgatcgaaataaaatgagaacaaagtaaaaaaaacagcagattgatagtgttgtaaaagattaaatagaaagctcggaataggaaattctcaggaaactattggttagtagatctaatgaaagctaagttcttatcgaatcattcttaaactcaaactctaattatggaataaccggtagtgttccgcaaaactccctatgtttatagctaagaataaccggagaagccaagaaatcttgaacctaaacatgcattctaaacgagttcaattgttcaccttagtagataggtcgattcttattacacacatataaactaagttcatcaaataatagatcaaactacagatacctatggtgggcattaagaataatcaaagatgaagaattctacaaataacctaacagggggcgatctactaaaccatatgaatccctaatgagaaaccctatttctaacaagcagactactcagacataataaatgaaacaaataacataattgagatagaaagcataaacacagcaataaagaaaagagttagaaaggatctcttcactgtattgaaaactgaatgaatctctgaagaacggaggatgaatagcttatgtctctaaaaatagggttttgcaaagaacttgataaaagaaacttaggtctaaacaatgtatataaaaccctataaaacgtccaggaactaataatgcaaacacggaagtcttctggggcaaatttcctcttctgtaaacttgaaagtgtcttggactttgctggaccgaaattggtgtcgatcgacaccaagagtgtgttgatcgacactctctctgattcctgaatccaaaatcgtctttagcttcctttcctttaggttttgctccaaaatgtctcctcatctccatggttgtcccattgcataaaatacctgaaaagacactaaaaagactcgagaaataaaataaagactcaaaatcctaaccctaaaccattgatagaatcagtgaaaatagggatctatcaactcccccagacttagcttttgcttgccctcaagcaaaacataaaagccgaacccgtggaagaggttttgaaaacaaaggaactcccaacattctctagcctattgccatgatcatccaaactaagtccatatgcctaacaagtctaatcaaatcctaaccaacatgtacttctctacaagcttacacaacattctagattttatacctaagttccacaactacatccaccaggctttcatcgctggatctcatctaacaagttaacattcaaggtccctctagactcatacatgtactataccatgataaatcgaccattctttatatatatatatatatatatattttttttgctttctttggtgttcattctctccccagacttattctttttagagggtaaacaaaggagaactcgcatactggatcgacaccctcggcatttttccaacctttgtaattgatcattccaaataatgtataataattgaatcatagtaaatattcctacccctatacactatctgaaaatcctatcaatctctcattattattatttttttataaggggagaggaacacattcttttttttttatcaaattggtctcaatatcaggtatgaataaggagtcaagatcgatgaatactaacctaatataagactcggtggtgagctttgtatctaatagagatggtggcttcaaaagctggtggtcgcttctctcttgtgaaggaaagatggtcgatgatggagatctaacacgatggtgatcgcttctctcgtgtgggatctattggaggggaagtgctggcgaattgaagttcaccacaaagatgtgataagtctctgatacagctccaaagtcttctcttggtttctagaggtcctctaatgtgtcaaacgatatttcatacctgggggagtaatttgttcaagaatcatttgggtgaatgcttcaacaagctcttcttcggctattagatcatatccggtatggggtgctacggaccagtttactccgagctctagggagctcaaaatatcttgcacagctaagttgaacattttcttcaattgtttagtctttgaaagtgtcatgataccctccgggacttctggtacaggatgtagttcaacggtatgtgaagtaaggttgatgtccgcatcattccctccgtcttcaaaaggttttgtcctcacagctgaatctcctggatcataagcaaacaagtcagcaacattaaaagtgtgagaaatttttacctcacttggtagctcttaacgataggcattatcattgatcttttcgaggatcttgaagggaccgtcgcctcttggtgctatagcttggatgctctttgtgtaggaaacctctcaggccgcatatgtagctactgtcctatccaccaagataaagcattttcggtgagcggagcggctgctaaggataccttccgagattctccataccgatagcattcgaaaatgttctccatccgtcgctcccaatccatgtacacctctggattagattttcctgcaaaactaggaggtgttagtttgatatctcggttcagttcacgcagttctactcctcgtgcacggtttctcatcaatggatcttctctccgttgatgttggcgtctcaaagggtcgggtggtggatcatcatcatcatccaactcaggaaactcctccgcctcttcgctggcattcccacgagcctggtcttgccccaattcaaccctaggatgtggctgctccaaacgacctatctgttgcctgaatcccgttaactcctctgtcaaagtagccatcatttgcattacggcgtgttgggaaatttctgcggcctctcccatagtatagcctaaaactgacctatgcttagacaaaaacaacaaagaaatcaacgtaccacagcaataaaaaagaaagatcaaaaacaagaaacctaggacttgttgaatcacttcctaacacacttgctgatgtagtacaaagttaacaataatatatattacgaaactcaaaaacaaattatttaacacggaataaaatgaaactgaaatacaatttttttaaaaatttttttaaaaataaaacagaaacaagactaacgcagaaacagattcagaaagtaaggcagacaaaaagaaacgatgaaacctggcaaaagaagcgcaactgcgctctgataccaagatgatacaagactcgatgctgagctttgtatttgatagagatggtggcctcacaagctggcggtcgcttctctcttgtgaagggaagatggtcgatgatggagatctaacacgatggcgatcgcttatctcgtatgggatctattgtaggggaagtgctggcggattgaagtacacgacagagatgcgataagtctctgatacagtacacgaatttggccttggtgaattgcacactcaagacaaagaagaggcttattctattaagaacacttaaagagaagaagtgagaaaatgcggttcttgattgataatcaaaggtgaaaaaatcgtacaactgctgcagagggactttataagagtccttcagctagttttagggccgaaattaaatgtaaaaatgcaacaagaaaacaaataaaatcaaaacacaaaaaccattgttttaagaaataaaataaggaaactaaataagttctcttgaggagcacgattgagggtgattctagccattgtctgggctgtgtggacttgtaaagataatataaactgaataaaccttacctagatgccttttagacccaataaatgtcgcctgagtcacttcctgtagtacttcttcaggtacttctggaatcaggtcttgtgctcgtttgctggctggttccttgaagtaggggtctttttggatttcctcttgagtagcttgatcaatgtcttcgcgctcttacatatccttgatgtcttggtcttgatcttgactgtctcgatcactttcagatgtgacacttgaattgttcgtctcttgaagctccaaagtcttctcttgttttctattggtccttgaacctatcaaacgatatttcatacctgggcgagtagttcgttcaagactcatttgggtgaatgcttcaacaagctcttcttcggctattagatcatatccgttatggggtgctaaggaccagtttactcctagctctagggatctcaaaatatcttgcacagctaagttgaacattttcttcaattgtttcgcctttgaacgtgtcatgataccttctgggacttctggtacaggatgcagttcgcggtttgggaagtaaggttgatgtccgcatcaaaaccgtttgaagaggtaaaaggaagagcagtgagattagctccagccttagtggttgagttggaaactatgatatcctcaagtctgttgttttgccatctagattttccaatagttggattgacttgaacctgttgcactcatcaatcaggcaataatcaagagaagtatagatcatgattcctaactaaactaaggaaaaatgactcaataaactcaaaaacgaaaaaaaataataagaataaaaaaataaaagtataattagtaaggaccttccccagacttaaacgacactgtcccagtggcatttaaatctagagaaagcgggaaaaataaatcgaaaataaaagaaaagggaaagaaaaatccaacaagtgggttgcctcccactaagtgcttgttttgatctagatgggcagctgcaggtgtcgaacgacactcagtggtgtgtcgatcgacactgatctcgtcacctacaagaatgacagggggaaaaagctttcgaagaactctaggagtgttatctagtgaagcagacttcgaagaatctaaagaattaatcgaaggtaaagcaggagaagagatagaagagaacttatcacataggtcctcaagtggtgtgggatgatgagattgtgcagaaccctctgtctatgaatcctgagagtgtcgatcgacatgagtggtggtgtcaattgataccgttgctctataactctcattggcgagctcagcttatgggagcgttgtgtgtggctctgttgtgggattctgagcagttggaggaggtgtggttgtgctagaggcaatactactgatagacttagtaagctcttaaccatccatgccaaactccatctccaaatcacaaacctttagagatattctacctctcttcacattaaacctagcacaagctgtagctaggaacgttcttcaaaggataagaggatccttggattccttctcatagtcgaggaccacaaaatcaaggattccttcagggatttgtttggaatgatccgcgaagagaagggtgatgcgagtcggcctgtagttagtcatgcctagtctctcggcaacagacttagacatgaggttgatacttgatcccatgtcacacaaagagcgactgaacctgcttgtgaagatagagcaatcaagaacaaagctacctggatctggaagcttctcagtggtctaatcatgagtgatggtgcagatgtactccgcaatgtccactctctgtgccttctctttcttgaacttaggcagcatgatttcactgatgtcccgtggcagcagtgaggcttcatctgagctaataccattgtcaacaagtcgcttgacatacctattaagtggggcaaaagatgtcttagatgtatccttaggaagagaatggaggatcttctccattatggttgttcacttagcagcatgaatctcctgcttagaacgacacttcctcggataagggataggaggagtataaacagactcgggctgcattaggatttgcacctcacaaggtgctattccatgggttagcatcaagattaccatgaagaaagccctcttgtctcttgatggattgtgtagtttgagctacttgtacatccagcttcttcaagtgagagctcagattgtcgatcttcccattaagatttgtgtaaacagcatcaaacttgccattaaactccacaacaagctttgtttggctctctagaatctgttcaagcatagattctattcttgtctttgatgagggtggaaggggggctgaattaccataggtcctctggaagttgctctgaggaaaggtcttctggaaagcatgctttagagtgtagttggaggaaatctggttccctgttgccactatagttcccttgtggctgtccacacttcatgtagccctgaccatctatgtagaagactctttcttcagactcagtctcaggctcaatagtctcatcctcatctgcaaagtggacatgcttcttccctctaagcaagttgtgaaccaaatccagcttagtattcacctctgccatctgattgcctgaaacagctccaacaatcttcttcctctcgaagtcagcgttcttagtactgttgctacaagcgagattatctatcaaagcggtagcatcagctgggtaacgtgtattgaagttaccattgctcgctgcatctagagcatttggtatctccaatcgactcctctgaagaaagtaccaaaaaattgtacctcactgaaaccatgatgtggactgtctcgttggtactccttgaaacgaacccaagcggccttgaaagctccagctggaccttgggtgaagtttgacagcttgctcaactcctcagacttagcatcatcgtagaaattgttcaagaaagctatcttgatgcttctccaagtcttgagggaacatgctttaaattgtttcagccaagaagcggcttccccagcaagtgaataagggaagaggttgcacagtaggtagtcctctgagactccattagctttgatgctcagaacaaggtcctcatagcactcgatagccaggtttcagctcataatcgttcctctggaagggttggggtacgatcgctgatcgattagcatagaacaagccaggcctgttgaaatccccaagagtacgacatggttccgtagctggaggaatagctgcataatctggggttggtgtcgatcgacacctctattgtgtcgttcgacaccaatcgcatctgcattctgctcccgaaggtgtcgatcgacacctagttggtgtcgctcgacaccgagccctaatgcgtcctcaggtaggatgagtccatgatcatccaatctctgtccagcctcattgtaggcttgcccatactcatctctcaaaactccttttgcatcagctcgaatgattctgtcagccattgctaatctttgggtttttcggttggtgcgttcaagttttcccaagtccaaaacagaaaagttgatcagctccttctgttgtttgctccttgtttgcctagacatacacctgaaacacagaaaagaagaaaacaagaaacgcgtgagtaacaaaataaaagtaaaaactagatgaaatttctaaactaaactcaattgtgattcccaagaactttggcaacggcgcgaaatttgatacggttcaaattaccctaagaactactctctcaaataagagatcaattgcagtatttaaggatcgatttccacaaagttcttttgttcaaacaatgagttgaatgtcgagattatatagagagctaggaacagggaattctcaggaaactattggttagtagatctaatgaaagctaagttgttatcgaaccattcttacactcaaactctaattatggaataaccggtggtattctgcaaaactctctatgtttatagctaagaataaccggagaaaccgagaaatgttgaacctaaacatgcattctaaacgagttcaattgttcacattagtagataggccgattcttattacacacctataaatcaggctcatcaaataatagatccaactacagatatctatggtgggcatatctattgtctggattcaagatctagttaattacttaagatctagcgttaagaataatcaaagatgaagaattctacagataacctaataggggtgatctactaaaccatatgaatccctaatgagaaaccctatttctaacaagaagactactcagacatattgaatgaaacaaataacctaattgggatataaagcataaacacaacaataaagtgaagattcagagttcaatcaatcagctgatggcgatcagaacgttgatggatttcagtaagctgcatcgagtcccatcacacgcttgaggtgcagacatggatgcaagagtagacgtggcgaactgaggcggatgatgtagagagccaagggtggaagccgacttggcgtggtgtcaaagacaagaatcaccgagaagatatggaagatattatctcgaagattaaggaaggaataagcttggagaaaataagaaagatttcttaaaaacgagattctcggagatcctaggtttagggttccgaagagtaggtattagtattctagagcttagtgtgaggcgctttgagcactctagaatactgtcatacgattgtaaacttcagagcattgcaaaagcttgaaggtgagtgtgtagttctcttcgtcttcacgtaagagtgataagaaacagagaagagaattaggcttaggtattcttagtcgggtttgatcttttgggtagaatagatcaagtaatctccgagataacatttgtaatcagtttgttatcaataaaaatatagtcagagtggtatctcttcaacaggtgagatcttgcgacagggtcatggagaattcacaacagtatgttacgatacaacagccattgaagctggatgctaagcattatggttactggaaggtgtctatcaagcaggctatccaaagcgatgaaatggatgcgtggttcgtagtggaagaaggatggacagctccggtggtcatggatgctaaggggttagaaataccaaagtccaagaaggattagatcactgaagagaagacagccgctaagaacaattcgacggccttgtcaatcatcttcagatccctgccaatgagtcaattcactcgtgtgtaggggtgcacatcagcgaaggaagcttgggacatttaggagacaacctttgaaggaaccagtaacgtgaagtggactagattggatatcctagcatctaaatttgaaaacttgaagatggagattgaagagtccattgaggagttcaacagtcggctaagttcaatttctcaggaggctgttttcttgggaaaaaggtacaaggacaagaagctggtcaagaagtttctcaaaagtctgcctgataagtttcaatctcacaagtcagaaatagatgtatcacttagattctgatactctaaagtttgagcaagtggtgggaatgatgcaagcgtatgaattgcaaatgaagaagaaggaacgctcatcatgaaagagtttgactctcaaggctgctgaatctcaactaagtgtaagtgaggatcaggttggtttgattgttaagaggttattcaggaaaaaggaacgaggacaacgcaagggtaattcatcagacagacgacctgatatgagtagagattcgaagagttcagaaaaaacagtgtgctgaatgtgagggatttggtcactacaagtttgagtgtcccacactgaagaaaaaaaggatattgtgctatgggtgcaaaggttatggtcataccaaggctgaatgtgttggaaatgaagaaacaaagcagaagtcatacatcacttggagcgaaagtgatacggatgacagtgcaggaggagaaggagagattctcaatagtctggtagctcaacttggtgtgattgaaacaggcactgaagaaacagttgagaatggtacactggaggatgttaaccaggaatctgaatctgagtcagacactgatgaaccagatctatcatcgagaagttcagaattctgattgaagagttggttcaaaagaaaaaggacaatgaagtacttggtgttgaaaaagagacactggtaatgcaagtggcgaagcttgaaaaggaactttctgaggaaagaaccaagtctgaaggattggaaaagcagttggcagaacaaatgaggaatatcaagatgctgaataacgagactaaggatctggacaaacttctaaccatgggcagaacatcaaatgttacgtgggggaaacactaaaggtgagactcagtttgtcaaaggatccactacagaagacaagtctcaagtcaaatcaacaatagctgttctgaatgagtttcgctctaagccgagaagagcaccttaggcctacaacttgagacaaatagactttagaccagaattcagaagcaggagaacgggatgctggtactgtggaggtttgagtcactacaaagcagactgctataactacttgaaacaggttgttcagactaggaaaagttatcaagcgggtgctccaggacgacaggtcagacaagtgtacgtcaagaaaagaaatctatagtgtcatcttgctcaaacatcagcaagtgtggaactcagtgacatgatgtggtgctttgatagtggatgctccagacacatgactggaacaatatacaatctcgctgggtatgaggatgtgacatctagaaaaatcaaatttggagatgccttggtcaaaaaaaagggacacacttcaggacaagcactgcctcatctaacaggtgtataccatgtcgatggactcaaagcgaatctgatcaatatcagtcaactctgtgatgatagtttaagtgtcatttttacacaaacaaaatgtagagctgttgacaaacaaggatttgtgaagatggaaggacaacatgctgcaaataactgttacatgtggaatccagaggaatcatgttgcactgcatcattggttgatgaatctgattcagaagatcaaacgctagtgtctctaccagataaatctgatgaatctgatcagatgagtgaagttatgagttctgtacagtagtttacagttgtgtacaataagctggcaggctttattcgagttcgcaatcaaaacggtatgcaattgttcagttttgtgtttgattagtctatttggcttacgtggctcaggttgttgggggaaaggtcaaatgatctcaagaggcaaacaatttcagttcttgttcctcactacaatcattcaagtcggctaacaacaaatacagtgtggaatctcttcaacaccagtgctatggacgagattcaggggggaaaagtgaattcggattcttcttatgttagcaactgggaagacgctatggagtgggaactgaactttgcaaagtccatcaggttattggggtacaatatctacaatcagatcattgatgaagtaggtcttgcaatgcgacttagaaatattctgctggctcaaggctatattctgatggaagacgagtcaaagatcgatactcatcttgctagaggtgaatctatcaggtttctgatgggatgtgcatgtgcagcacagttttatgtgcatcagatggtggtcaagaaagaaatcttgagtagtgaacctcaaagggattggtttgagaatcaaccaagagcattcgggagtccagggcatccgtactcggctcatagattgaaaacagctgtctactgtttcaagcaaaatccggaaacatattatgagcgtctgcccatgttccttgaagaaagaggttatcttcggagtgttcatgacaagatattgtttgtattatcagacaacaagggattattgttggtacaactgtatggggacaatgtgctgtatggttcgaaaaatcaagctcttgtacaagactttgttgaactcatcaccagagagtttgaggtaagtatgtacggagatctgaggtacatacaaggaatgcagattaaacaggcagatgaaggcatatctatgtctcagaacatgtacgtcaaaacaatgactgagaagttcaagctggatgcacatgaggtggccacaacaccgatgaagatctctacaagacttactgctgattagagaggagaaaatgtgaatatcagcatgtatcaagggatgatcgagagccttcaatacttaactgcaagtagactagacatctgtcatgtagtaaatgtgtgcgctgaataccagcttaatcccaagagttcgcatctgacagctgtaaggagaattc

SEQ ID NO: 1472 - DNA, 141430 bp, Arabidopsis thaliana
aagcttttacaatgctttaaagtttacacaatgtattgaaaatatcctagagtgctcaaagaggctcaccctttgctctagaatctttatacctattctccagaaccctaaacttaggatctccgagaatctctcgatatggaatcttcgttgtttccaagcctattcctttccttattcttcgagacaatatcttctatatcttctcgatgaatcttgtctttgacaccacaccaagttaacttccattattggctctccacatcatccgctacagcttgccacgtttgctcttgcatccatgtcaacaactcaagcgtctgatgagattcgatgcagtttcctgaaatccatcagcgttctgatcgccatcaggtgattgattgaactctgcatcttcatccaatctcacatatagctcatatgaataaaagaaaaacttatgcaatcataaaactgtgataaaaaaacctttaaacttcgttcataaaacggatgattatctagtataagaaaattccaaatgcttgatcacgagagttcgaccccacttccccccttcccccccccccccaacaaattgagaaagtgtcaaatataaccgttgacaaaaaaagaagaaggatattacataatttaatcaattatttgcagttgtgcttgccattatctttgctatttcctataagttggggaatagcttatgtataatgttaccatagattagggagtaattttcgggacttaattaacaaaaatacgcactgattataaaaaacttaaacaaatattaatcaaaattaaagaatttatatattcgtaacaaacttgaatcattcaatttatacccatagtctcctaaacttcaggtcatctgaaactgtattctcataaacagaaacataaaaactctgagaacaagatcagaacaaaaacaaatgaacataagaacaaatatggggtcaaactttcatgcttttatggttcaatggttcgattttggtcacatgactgcatttttgcatttggctgagaaagggcacaaaataactttcttgctcgccaagaaggctttgaagcaacttgaacctctcaatctcttcccagactgcattctcctttcacattcttaccatcgcttttctggataccctccctgaaggtgctgagacaacctcgaatatcccgatatcgttagggagttttctagcctcggctatggatcggacatgtaatcaggttgaagaagcggtttctatacttaaacccggatatgattttcttcgattgtgctcactggattccagaaatagctacagagtatggtgccaagagtgtgaatatcataacgatttcttcagcatgtgtagctatctcatttgtgcctagtaatcatccaaatgacttggttagtactccaccgggatatccttcttcgaaggtgttagtagctgagccttggcgtcagtagcttagctagttccaaccaggatcagtaatatattgtgcattaggcagccaaattattcttgaaaataatcaattccaagaactttgtttgaatggagctgaaaggtttaccatttcttgtcgcaatcactacaagaatttcggccattggtagcagatgattgtagcactaattcactaactgctagtaaaagtgataaaatcggatggcaactatattgtagcattaatttagtgctgagaaagaatttcattaagcggcaacccaaaaatcattacgatagaagaaaaatcattgtggaggcaaaaaacttagccaaaaatttggtttttttgccactctcttcacacttagacaaaagcattcctcacttagacaaaatagacaaaacacttcgtcgacgataccataaatttcgtttcgggtcactgatataggtcaaattgcattaagaccactctatcaaataagagatcgattgtaacacttaagggtcgaattttacaaagttcttggatcaaacaatagatcaagattttgaattaagctaagtaaaatagtaatgaaaaagaaaaaatagacgaaaataatagcaaattgtgaggttgtaagacaagaaagtaaaaacgtcatgcttagggtactctcaggaaactattggttagtagatctaataatagctaggttgttatcgaaccattcttaaactcaaactctaattatagaataatcggtggtgttccgcaaaactccatatgcctatagctaagaataactggagaagccgaaagatctttaacctgaacatgcattctaaacgagttcaattgttcaccttagtagataggccgattcatattacacacctataaacccggctcatcaaataatagatccaactacagatacctatggtgggcatatctattgtctggattcaagttctaggtgatcgatctagatctagcattaagaacaattaaagatgaagaattctaccgataacctagtaggggcgatctactaaaccatatgaatccctaatgagaaaccctaaacctaacaagtggattactcagacatgatcaaagaaacacaactcatagtctgaataagaaatcaataatagcaagagaaagagtaaagaagatcttctccaaagggagtctccatagggttttgctcccaaagtacaaaagagataaggagattagcctctctaagcttaggtctaaacaatgaccttaaaaactatatatatgacctaaaaacgtgatgggccttctttagaaataagggaaagttctcggccgaatttggaaatcttcaaaacatcaataagttgcgtcttcgaatcgccatcaggtattggtgtctcttgacaccaggggtggtgtcgttcgacacctacgcggattttggtctgcgaattgcttctgcaacttaagttgtctgttttgctccagaatgctccataatctccaaatgcctgccaagcatgtaaagacctgaaaaagactataaaagactctatagaaaagactctataaataacaaaaggactctaaaacctataccttaatcatagctaaaagcagtaaaaatagagttatatcagtcaccacaaaacctaattcccttcattcctcaacctctttcgcattgattccctcgatttccggtcattcctcaaccttcttcgcctcgagttccctctcctttcaaaaaggaaatcatcactttatcgctgagctaagtttttctcttctccgacgctttattccacttgcaattatgaagaaaaaacctagatcttaaggtaatcaatttacgatttttggaattatgaactctagatctaatcgtcattctcagtcttaattcgatttctctaattactttccattttaactctcattgtagcaagaatcaaagtcgtagatatatctttgaggaccttacacgattataagcaagagaatcaatctcctttacaatctttaggttatggttcttatattcgtttgacaactagtagtttacaatcttaagacatatataaagagtttgcaggttgctattagaatttcttagcttctgatattagtttaaaggttggatctttttgcaacataaggagttttcaaggtttctagctcgggcgaaaacgactttaacttcagaagcttatagtttgtaggttagttgttttgacttttagattcgagatgggtttcatacgacttcaacttcaaaagcttatggtattagtttatttgtttaatcttgtcaatttttttttttttttttttttttttggaatatttagaagttcaaaaagatcctttccaaggtatctcaaacctagcacctccacctcggagatttaccactaagccaacaacacgttggtgtttaatcttgtcaatgtgaatgtcaatgtgtttgtttggtgtttgaattcttttgggtttgttatattttgcttatgggtaagaacatacaatggtcgaaaagtcataagttcatctgaacaagtatgtgaaaaaatatacttatgggtttaatgtgggattaaaagaattaaggttttcttattgttttttggtctcatcttactttgcataagagttgatcctggttataagagaggtgctagggattttgtgaggtctgtggttgcagctttaggagaaatggagatgatttatttgcatgtgtattcactgtcgcaacgtagaccgtcactcaattggtattgttgtcgatcatcttgtaacaagaggaatggatttgagttacaagatgcaagaggactggtatcataatggggaagttaaatctgagactgagagtagaagcaatgcaagtcagtcgaaccaagagattttagggttataccaagctgctgagtttggagatgaagagttagttaggtaggtagatataagtgagggtgctgaggcttagaataagctagaagatgagtttcatgcaaagctagccgatgcagaaacacccctataccctagttttgcaaaccacaacaagctatcatcaatagttttacccttcaggataaagacacaaagtggttggtctgacaaaagcttcggtctgctgcttcaaactttttcatagatgcgataatgtattgcacacatcgttatacgaggtgaagaggtttttgagatattttgagatgggttatgagaagatacacgcttgtgtggatgactgttgtttatccagaaagcagtttgagaagctcaacaattgtccgaaatgcaatgcttcacggtggaagattaacacccgcattagtgaagttaagaaaggtattccacagaaagtacgtaggtattttccgataattccacgtctcaagaggatgttcaggtcattagacatggagaagaacttaaggtggcactttagtaataagagcactgaagaaaacttctgtgacgtgggatcaaatgaatgataaatacccgtcttttgcctctgaagagaggaacattaggttgggactctcgtcagatgagtttaatccgtttaacatgaagaatgttcattatagtgcttggcctgttttgctagtcaactacaacatgtcacctgacaagtgtatgaaggaagagaacatcatgttgtcattacagattcctggtccaacccaatgtggaaacaatatagatgtgtacttagaaccccttattgaagatctaatcgatctgtaggagaagggaaagtcaacgtataacgcattcagtcaaaccactttcacattaaaggaaatgcttatctagaccataattttcctgcatacggaaatgttgttggctataaggtgatgggcaaaatggcatgtcctgtttgcggaaaacatacagaaaatatgtggttaactaattgtagaaaacacgtatacatgtgccatcaaaagggtttgctacccacacatgtttatcgaggaaagaaagcatggtttgatggtaaagctgagcatgggataagaggtcggattctgagtggtcctaacatataccaaatactcaaaaattacaagaatgattttgggaatgtgaaagtaacaagaaggaagagaaatatgaaatagtgtgttggttcaggctcaaacactaatgatgataccagtgaatcagaggaagatgaagaacaagtagatgacgatgagttatctagttggaagaagttgtttatcctttttacgttgccttattggaaagtatgttcctaaggtggtttttaatttatcatttcagaattgatcgattttcaatgtctttagggggggttattggatcattgatttgaatggatttgaaaatccaagtaacatttggaaatccacacagaatctattgttttaaaaatcagacaacgtggatttgaaagtcaaataatatggaattgaaagtcaaataaagcagatttgaaattcatacaaaaggattacaaaattaaaaacattacaatctttaaaaataatctctcacgttctgatctatgaattctcaattgaatcattccacatgtttgatgttatcgtttctctccactgattggcatattctctatatttatcttgggttgtaagaacttcatcattattgtcattaatttcttcgacaacttcttctacactttcgtcttcttccagaaaattatccgttcgacaaaactttcgaagaaaattatgtaaaccaacacatgcaagtacaatctctgtttgcgtcttataaggaaaaggaggttgatatacctcgattttcacaacttttaactatgatttaggtatagtttttagagtccttttgttatttgtagagtcttttctactctttttcaggtctttacatgtttgggatgcatttggagattatggagcattctggagcaacacagacaacttaagctgcataagcaattcggagacggaaattgacgtaggtgtcgatcgacacaacccctggtgtcgagcgacaccaatacctgacggcaattcaattgcgcaacttattcgtgttttgaagatttccaaattcggctcagaactctctcttatatccaaaaaaggcccaaacgtttttaggacttatatattgatttttatggtcattgtttagaggcataactcttattatctcttttattcttgagagcaaaaccctgtggagactccctttagagaagattcttctaaactcttttctcttattaatttcatcattgatttcttattcaataatgttttgttcttctatgatcatgcttgagtagtcctcttgttgggtttagggattctcattagtgatttggataaattagtagatcgaaaacccttttagggtaatatatttagaattcttcatcttggattattcttaatgctagttttagagtaactaactagaacttgattttaggataataggtatacccaccataggtatctattactgaaactatcttaaatgagcctaatatttagatgtgtgctagcgtccattacttaggtgaacttatcaaacctgattataatgcttgcttagttctagggatttacaagagaattaggatcaatactattaagcatagtgaatttcgcggaacaccaccggttactttgtattagtgatttgtgttctagaatggttcgataataatcctaatttactgctagatctactattatgatatttcctgagaattttcctaaacccgacgtcttaatcatctgaatctacaatctcttttatttcttgtcttgtcttttacttttattacattctctgtttagctttattcgaaactattaatctactgtgtgatccaataactttgtggaattcgatccctaagtgctataacaacctctttatttgagagagtagtcattagggtaatttgactcatatcaaatttggcgcccttgccgaagttctcttcgattcaccattagattaggtgtagaatttagtctaagcttttcttttcttttgttactcacgcgtttttatttcttcttcttcttgtgtttcaggagtttaaggaattcaaacgcaactacaagatgctgatagtaatacctgatactgctggagtgttacgcgatagtgctggtcaggcatacaacgaagagggtcagaaaatagatgaacagggaaacctgataccagaaatcgctgatggtgtcgatctacaccagctgggtgtcgctcgacaccaagaagaaatcaaagcagatggtcgtcggatgactcttggtgactacaacagaccggatctcttctattccaatcgatctgcaatccgaccacctacctttgaaagaagcgattttgagataaaccctgcattatatactcttgtgagtatgcatcctttccatggtctttcacaagaacatcctatggatcatattgagcggtttgaagacttggttttgagcattaaggcagagggtgtttcttatgactatcttccccacaagctcttcccatattctcttgctggggaagcatcttcttggcttaagcagttgaagcctggatctttgacaacttggaaagaaataaatgttacttttctcaacaacttttttaatgatgcaagatccgaggagctgagaatggagatctctaccttctcccaagaagcaactgaagcatttaaagccgtttggatcagattcagaggatatcagagagattgcctgcatcatggttttaatgaggttcagttgttaggactcttcttcaaaggagttgattggcgatatcagatggctttaaatgcagttagtaccaaaagcgttgacattgcaaggaaaacgcaagttcagtatgttgcacaagttgacagtttagccacttcagaaaagatggatcaacagagatacatgagcttcaatcaacaatcaacacatcagaaatcggttcagcaaagtacaagcttcatttagaatcatgcttcttcaacccaagcccaccctccacccgacaccactaagacgatcaaatctatgctcgaacagattctcaaaggtcaagagaagcaaacaacagattttgatcacaaactggttgcattatccgacaatatgaataggaagattcaaatattgaacaatcggatcgagcaattaactacaaacaaagaagatgttcgtgctattaagttaaagagtggaaaacagctaaatccagtgcttcaacgagagcttcctacaaccaaaatcgttaatttggaagaaaatgatgttgcagtttttgcagaccagacacaagtgtcgaccgacacagctgggtgtcgatcgacaccagccacgacagacactacagaacgcgacagtgtcgaccgacaccaacagggtgtcgatcgacaccaaccctgcccaaacctgcgaattctccaaaacccgatttcagctgcggcaaaggtaaccaaacccaaggttccttttcccaagagtcctaggaattccatacaggagcttgatgatgctagatgcaaagctatgatggataagttgattgtagagatgccactcatagatgctgtgaagtcttctcctatggtcagacagtttgtgaggaggatggttactaaggatttgcttattgagaaagctgtgatgacgatgtctacacaggttagcgacattattcagaacaagactccacataaacttccagattcaggtagctttgttctcaattgtggtatccttaacgagagttttgagcgatgcttgtgcgatcttggttctagtgtcaacttgatgccacgttcagttgcgcttcagcttggtttgacagatttagagcctacacaaatcactcttgttcttgctgatcgatctgttcgtagacctgatggtatcctatgcgatgtccttgtacaagtcggtactagctacattcctacagattttgtggttttatcttatgagaaagaacctaaagatcctctaatcttgggaagacctttcttagccacaactggtgccattattgatgtaaggaagggcagaataggattaaatgtaggtgatcttacaatgcagtttgacatgaataaggtggttaagaagcctaccatcgatggacagactttctatgtggatactatctcttctctggctaacgaatttctcatgaagatgacacctactgatcctttgaagcatgctctgattccctcaattgacaaagttcccaacgggtatagtaagctgctggataggactgagcatgtgatgcaattggttgctcaagaggagttaatttgcacatctacaaaagcagcaatagttggtgacgtgagcccagaaaaagctcctaaagtagttgatctaaaaccatttcctgcagggctaaggtacgcatttcttggtgcaaattctacttacccagtcattgttaatgcttctttaaacaccgcaaagctcactttattgctaaccaagctgcacaagtatcgcaaagctcttggctattctcttgatgatattataggtatctctccagacttgtatatgcatatgattcacctcaaggatgagtctaagccctcagttaagcaatagagaagactaaacccaaatctgaaagatgttgttaagaaggagataatgaaactgttggaagctgggatcatctaaccaatttcagatagtgattgggttagtccagtgcatgtggttcctaagaaaggaggtgttacagtggttaagaatgacaagaatgagttgattcctacacggatagttacgagccacaagatgtgtattgactacatgaagctgaacagtgcaacaaagaaggatcattttcctctaccattcattgatcaaatgttggaaaggttagctaatcacaagtactattgctttcttgatggatactcagaattcttttatataccaacccatccagatgatgaggagaagactgcattcacgtgtccgtatggtactttcgcatatcgcaaaatgccatttggtctatgcaatgctcctgcgacatttgcgagatgtatgatgtcaatcttgacaaacatgattgaggatttcatggaagtctttatggataacttttatgtttatgggtcttcattgggttgcctgaattttcagccctatactagttgcaatctcaactttccaccctaaacttttagccacttcaaaaaccaccataaaaaactttgttctcgataaaactacacgtactttcagatttgttctaaaaactacgcctccaattgaaccgatctgttaaacgataattatacatctggtttgttttacccagaatttaaccaaaagtaattcgattttgactctattttaacccaattttgacctaaaaatataaataaattgtgtttttaagaagaaaaagtatttttattaatttttgttaatttttatttgtgataaacatttaaaaatattaaattataactaatttttagcaaaacttaatatgacaaaatatagcccaaattctattttgagctatattttgttataaatttttgataatatacaaacatgtaaattttcattttggcaccataatatatatatatatatatatatgtatttatatatccgtaataaaaacatataccgaatatatatacaccataatatatatatatatgtatttatatatccgtaaacaccacaatcaaagtatatattatggtatttataaatttatttttctttacagattctgttttctttttttatattcaagagaagttagatatgtatatatatatatattatggtgtatatatattcggtatatgtttttattaccaaaatatatactaaaattatattatataaaacatttaattatataattttgtgtggtatattttgttatattattatttgttaaaatttatttctttattatttttaagtttttatcaaaaaaaaaaaaagttttgttttagagaaaatattttttgggtcaaaattgggttaaaatagagtcaaaatcgaatttctggaaaagtaaaaccggaggaatttcaatcggttgattgatcggttcaattggaaccgtaggtttaagaacaaatccgaaagtatatgtaggtttatcgagtgtaaagtattttttggttgtctttcaagtgccaaaaagtttggggtggaaagctgagattataactactatagggctgaaatttcaggcaacctgtcttcatttgaagcatgcttggagaacctttgcaaggttctggctagatgtgaagagaagaatttggttcttaattgggagaagtgtcatttcatggtaggtatagttcttggtcacaaagtttcagctgctggtattgaggttgataaagccaagatagaggttatgacaagtttacatgcacaaaatagcgtgaaatctgtgaagagatttcttggacatgttggattttacaggaggtttgtcaaggatttcagtaagattgtcgagccactaacagctttgcttcgtaaggatgtgaagtttgacttcaactctgagtttcatgctgcttttaataagattaaggaggccttggtgagtgctccaatagttcaagctccggactagaatttaccttttgtgatgattcaagcgattctgcagttggagctgttttgggacagaggaaaggcaataaacttcacgttatccactatgctagtagaacacttgatgatgcacaacggaattatgcgacaacaaagaaagaattgttagctgtggtttttgcttttgagaagtgatataaccctatttttactacttttagctatgatataggtataaggaaagtaaaggtgtattttctcccaggcacaattcttgagagaccaccttcgcaattggtttctggcaccggtagagcccttgctcatcggcgctgggatctctctctctttaatcgatcttctctcacccttcttcccttatggttctatctcttgctttggttttcttttcactcctttcagaaactctacctaatatccaaactcttctccagcgataaatctgaactcttatctccattgaccgtcagatcccttagctctcaccctttcgcgattctcgcaggtcaagtcactcaccgttcctcctcacaagctgcttctccatcatcctcgtcatggaattcagatcccttcatcaagtgttctactcggttgtggcgggaccagaggctcgagttgtcacttgaaccgctgaatcttagttcggcggaagaatcaaccaaagtagacgttttatcttgttcagcagcagctacaactcggttagcttttgtcactattcttttggtttggcttcttagcatcatctccgatctgccgccgttgccattgaacaacacaaagaaggagctaaacctaatgttgctttgtctctctcttaatgggcctagccgaagaagtttctgctttccctacagcccaagactaatcctatctcagtccaagcttaactaatgggcttaagcccttattctttttggtcttggtttgatctctcatttctcttgcttagtctaatgctagaactattctattcgttcacagaaggcaatggagacctttttgtttcaatagcaatggttttagcttggtcttgtcattatcattctcgaaacctactagatagatttgttcgattgatttttgttggaagacttttgtcctcccattgcaatatgcctgttagagtaaataagtccgacattatgatcccgcctctatggagtagggattaccgacgctttttcaactctctttccccattacctctgattaccgagctctatcacgcgaccatcatttgtttggataatttgcaaacttttgttagtttgggaagtcacggcattatgaccccatctccaagaggtggttaccgtatctccttcaaattgttctaccttttagcatctcccgtggagcaccttctcaaaggctcatatgcattgtttgcaataaccgtctatgaccacaagttggtcgaagatctcgcgaagcccgtcttcatggtcgaatccgccaagggctcaatagatttttcaaaccttgtaaacttttttaaaagtgaacacctctttgcaaaactcatgaagcctatatctttatttccttgttctatcctatttgtaatttgtatgaacttccctcttttgaggcttaagtgaatggaaattattgtttgacaaaaaaaaaaagctatgatttaggcattagctttagagtctatttgttatttcgagagtcttttctagtctttttcaggttattacatgtttgggattcatttggagataatggagcattctggaggaaaacggaaaatatatgctgctaaaaaaatcctgagactaaaaaccgcgtaggtgtcaaacaacaccacccctggtgtcgagcgacaccaatacctgacggcacttcaaagacgaaacttattgatattttgaagatttccaaatccggctcagaatctttgtactatttttaatcaattcccatcacgtttttaagacatatatagtttttaggtcaatgtttagaccctaagcttggagaggctattctccttttctcttttgttcttgggagccaaaaccttgtggagactccattttgagaagatctttctaaattgtattctcttatcgtttcttactttgatttctactttatacatgttttgttctttcataatcatgtctaagtaggtgtcttggttggtttagggattctcaattagagatttggatgaattagtagatcgaaaacccagttaagataatatatttagaattcttcatcttagattgttcttaatgctagttttagagtaactaactagaacttgattttaggataataggtatacccaccataggtatctattactgaaactatcttagatgagcctagtatttaaatgcgtgctagcgtcgattacttaggtgaacttatcaaacctgattataatgcttgcttagttctagggatttacaagagagctgggatcaatactattaagcatagtgagtagcacggcacaccactggttacattatattagtgatttgtgttctagaatggttcgataatattcgtaatttacttctagatctactattctgatattttcagagaattttcctaaacccgatatctgcatcatttgaatatacacccaaactcgtttattgctttcttgtcttttattttataatctatttgtttagcttaattcaaaaccttagtctattatgtgaactgagagttttgtggaattcgaccctaaagtaatacaatcgatctcttatttcagagagtggtcttaggactaatttgacccatatcaaatttggcgccgttggcgaagttctctacgattcactattagattaggattagaatttggtttaagcttttatttttctttttctttttatttacttagtctttctcttttcttttcttgtgtttttcaggtgtttgtctaatcacagaaccaggagcaagcgagaaacatgagagagagtaagattggtgggatcatggctaagcttaatgtggtcacaataaacttgtggaggatgtcgattatgttcgtagcagaggttttccgaatcagagatttgatcaccaacaaggctatagaggttcctatgggaatggtccaactagctacactcagaattctcagttccaacaaccgcttcagaatagcaatagtttcagcttcacaaagaactatgatcttgcttcttaccaacccccaccctccacccgcacctagaagcaagatataatcattgctggaacagattctggatggtcaacagtggatcttagagagacctacccctagatggaatgagagcagcctcagcacttcttgggatgctgtttcaatggaaagtgagtatgagttagtgaagattgaggggagtgacgattttgaagttgcagaggcagtgtcgaacgataccaacccttggtgtcgatcgacaccatcacatatatacgagacatcgggttgtgacaaagcaaaatggaacaggctcgacattgatctccagaatcgctcaacacacattgatagtgtcgatcgacaccaccagtaccaagctgaggaagtgttgacgtttcacggagcagaatcgaccgagattgacagagtaggatcgataccagatagtagtgtcgacgacactcacctggtgtcgatcgacacttgatgcaaactgcaccaatcagccttgactttccacctgttgttaaactagtctacacacctgaaattccttcttcattgcctcaacagtatatgcaagggattcaaaaggaccactacaagcttccatagcataaggagaacaacacgaagacaaatattgtcttagaacagattacagcgctgaattattaacatgctaaggaaactcgagttgtagcacgagtgtcgattaccactcgcgtcgatcgacacacatcactagttgaagcagagttatctctgatagctacttttcaagctgggatcacttctatcagtccaggcactactgtcacgtcacacattgcacctctcatacttcatccaactcctaaacggctaaggtattcatctcctcctccaaaacctccatatatcatcaataagactttaaaatttccaaaaattgttttacggttaagcaagccacgagtttctcgtcgagcgcttgttctttcttttgatgattgtgctggtaaaaggagtattccacccatacctgagtcccaccatgctgatgctcctctcttcctagatagagctcatacactacttgcttatacaccagcatggataatgagaggtctttctccgcgatatttactgccaccaactgatccacttgatcctcatattccatcaaagtcaagctattgactataaacaagcgcttagtgggaggcaacccacatgtatgattttattttatttcatttttcttttattttacgttttccttttatttttcttgcttactccggatttgaatgccactggggacagtgacgtttaagtctgagggaggcagttagtaagtacatttttctttttgagtcttatgcttactcttatttttcttatttttgagtcgttttattgagtcaaaattttgttgggaataatgatctctattctttagtttattgcctggttgattaatgctgcaggttcgactcagtccgactattggaaaatccagatggcaaaccgacaaacttgaggatatcctggtttccaacacaatccactaaggctggagctaatctcattgctcttccttttacctcgtcaaaacggttactcttcatagaactttactccttgttcatacttgatactgagaccaatgtgaaaaagaaaagtattcctctccccttataaaaaaagaagcaagagattgatatgattttcggtagtatataggggtagaaatgtttacaatgaccccattattatacattattatgaatgattaattacaaaggttggaaatatgcctagggtgtcgatccagtatgcgagttcccctttgtttactcttaaaaaagaataagtctaggagagaaagaatacgaaagaaaaaaataatatacaaagaatggtcgatttatcaaggtatagtaaaggaatgagtttagaaggttcttgaatattagtttgcttgatgagacccagcgataaagcctggtggatatagttgtggaatttaggtatggtatctagaatgttgggtaagcttgcggagaagtacgtgttagttaggatttgattagaactgctaagcatatggatttgattagaatgatctaggcaatagactagagaatgttgtgagttcctttgtttttcaaacctcttccacgggttcggcttttgtgttttacttgagagcaagcaaaagctaagtttgggtgagttgatataaacctatcttttactgcttttagctaagatttaggtattagttttagagtttatttgttatttctaaagtcttttctactccttttcaggttattacatgtttgggattcatttggagataatggagcattctagaggaaagaagagaatatatgttgttgaagaaatccggagactaaaaaccgcgtaggtgtcgaacgacatcacccctggtgtcgagcgacaccaatacctgacggcaatttgaagacgtaacttattgatgttttgaagatttccaaattctgcctaaaactttctcctatttataatcaaggcccaatacgtttttaagacatatatatatatagcttttagccacttcaaaaaccaatataaaaaactttgatctcgataaaactacacgtactttcagatttgttctaaaacctacgcctccaattgaatcgttcagttaaccgataattatacatccggtttgatttaccccgaatttaaccaaaattaatccgattttgactctattttaacccaattttgactctattttaacccaattttgacctaaaaatgtaaataaattgtgttttttagaagaaaaagtatttttattgatttttatttgtaataaacaattaaaaataataaactataacttatttttagcgaaacttaatatgacaaaatatagcccaaattctattttgagctatattttgttataaatttttgataatttacaaacatataaattttccttttggcaatcaaatttttttaataaatttaaagctatgtctttttatgaaacaaaatattcatttttctggcaatcatttgacctttgaaatttatatataatgaaattcaatataagccaaattcatatatatatatatatatatatatgtatttatatatccataaataccacaataaaagtatatattatggtatttataaatttatttttctttacagattctattttctttttatatattcaacagaagttatatatgtatatatatatatattatggtgtatatatattcggtatatgtttttattaccaaaatatatactaaaattatattatagaaaacatttaattatataattttgtgtggtatattttgttatattattatttggtaaaatttatttatttattatttttaagttttaataaaaaaataataaaaaaaaagttttgttttagagaaaatattttttgggtcaaaattgggttaaaatagagtcaaaatcgaatttctggaaaagtcaaaccggaggaatttcaatcggttgtttgatcggttcaattggaaccgtagttttaagaacaaatccgaaagtacatgtaggtttatcaagtttaaagttttttttggtggtttttcaagtgccaaaaagtttggggtggaaagctgagattataactagtatagggctgaaacttcaggcaacctgtcttcatttgaagcatgcttggagaacctttgcaaggttctggctagatgtgaagagaagaatttggttcttaattgggagaagtgtcatttcatggtaggtatagttcttggtcacaaagtttcagctgctggtattgaggttgataaagccaagatagaggttatgacaaatttacatgcacaaaatatcgtgaaatctgtgaagagatttcttggacatgttggattttacaggaggtttgtcaaggatttcagtaagattgtcgggccactaacagctttgcttcgtaaggatgtgaagtttgacttcaattctgagtttcatgctgcttttaatcagattaagtaagccttagtgagtgctccaatagttcaagctacggactggaatttatcttttgtgatgatgcaagcgattctgcagttggagctgttttgagacagaggaaaggcaataaacttcacgtcatccactatgctagtagaacacttgatgatgcacaacgaattatgcgacaacagagaaagaattgttagctgtggtttttgcttttgagaagtgatataaccctatttttactacttttagctatgatataggtataaagaaagtaaagatgtattttctcccaagcacatttctcgagagaccaccttcgcaattggtttccggcaccggtagaccccttgctcatcggcgctgggatctctctctctttaatcgatcttctctcacgcttcttcccttatggttctatctcttgctttggttttcttttcactcctttcagaaactctccctaatatccaaactcttgtccggcgacgaacctgaactcttatctccattggccgtcagatcccttagctctcaccctttcgcgattctcgcagatcgagtcactcaccgttccgcctcgcaagctgcttctccatcctcctcgcaagctgcttctccatcctcctcgtcatggaattctttatcaagtgttctactcggttgtggcggaaccagaggctcgagttgtcgctggaaccgatgaatcttagttcggcggaacaatcaaccaaagtagacgttttatcttgttcagcagcagctacaactcggttagcttttgtcactattcttctggtttggcttcttagcatcatctccaatctgccgctgttgccattgaactacacgaagaaggagctaaacctaatgttgctttgtctctctcttaatgggcctagcccaagaagtttcttctttccctgaagcccaagacgaatcctatctcagcccaagtttaaactaatgggcttaagcccttattctttttggtcctggtttgatctctcatttctcttgcttagtctaatgctagaactattctactcgttcacggaaggcaatggacacctttttgtttcaatagcaatggttttagcttggtcttgtcattatcattctcgaaacctactagatagattttttcgattgatttttgttggaagacttttttcctcccaatgcaatacgcctgttagagtaaataagtccgacattatgatcccgcctctatggagtagggattactgacgctttttcaactctctttccccattacctctgattaccaagctctatcacgcgaccatcatttgtttggataatttgcaaacttttgttagtttgggaagtcacggcattatgaccccatctccaagaggtggttaccgtatctccttcaaattgttctaccttttagcatctcccgtggagcaccttctcaaaggctcatatgcattatttgcaatagccgtttatgaccacaagttggtcgaagatatcgcgaagcccgtcttcatggtcgagcgacaccaatacctgacggcatttcaaagacgaaatttattgatattttgaagatttccaaattcggctcagaactatctcctatttttaatcaaggcccatcacgtttttaagacatatatatagtttttaggtcaatgtttagaccctaagcttggagaggctattctccttttctcttttgtttttgggagccaaaaccttgtggagactcccttttgagaagatctttctaaactctattctcttatcgtttcttactttgatttctactttatacatgttttgttctttcataatcatgtctaagtagttctcttggttggtttagggattcttagttagagatttggatgaattagtagatcgaaaacccagttaagataatatatttagaattcttcatcttagattgttcttaatgctagttttagagtaactaactagaacttgattttaggataataggtttacccaccataggtatctattactgaaactatcttagatgagctttaaatgcgtgctagcgtcgattacttaggtgaacttatcaaacttgattataatgcttgcttagttctagggatttacaagagagttgagatcaatactattaagcatagtgagtagcacggcacacccccagttacattatattagtgatttgtgttttagaatagttcgataatattcataatttactgctagatctactattctgatattttttgagaattttcctaaacccgacgccttaataatcttaatctacaaccaatctgtttattgctttcttgtcttttacttttataatattttctgtttagctttattcgaaactattagtttattgtatgatccgagaactttatagaattcgatccctaaatgctataacaacctctgtatttgagagagtagtcattagggtaatttgactcatatcactgaactcccagaacatcctcatgttgtatccctctttttttttggttaaaattgtataactcaataacttttagaccatgaggtcaaacttggcatgtaatacctttttggaaagcccaaagagatccgtccgacgaaagaagcaggaaaatgggtcgaggtaccatttttttttactccaaattttgacgtttaggtaatttttctgattttcccgtgatctgtgctatattcagggcccaaaatattttgttccaacattgtttttaaatatttttgatgtatcaaacctcgttaaaactaggtggggtatctctatgtagtggctgggagccacgacaaattgttcatagtcttcaaaaaaggataaatacaattgcacagcatgaactaaccgatgcgattataccagcactaaggcaccagattccatgagaacgtcgcacctaagcgtgcttgaacgatagtagtattaggatgggtgacctcccaggaagtctttgtgttgtatccctttttttttggttaagattatatgattctattacttgtagaccatgaagcaaaacatgacatttgatacctttttggaaagcccaaagagaaccctccgacgaaagaagcaggaaaatgggtcgaggtatcattgttttttttttactccaaattttgacttttaggtactttttctagtattttaatgatctgtgctatattaccagcccaaaattatttgtgaagacgttgtttttgaatgtttttcatctataaaaattcgttaaaattagatgaggtatccctacgtagcgggagagacccacgacgaattgttcctaaagtcttcaaaaaaggataaatacgattgcattgcatgaactaacggatgcgatcataccagcattaatgcaccatgtcccaggagaactctgtagctaagcgtgcttgggcgagagtagtacttaggtgggtgacctcctgggaagtcctcgtgttgcatccctctttgttttttttttgttaaagctgtatgactttataactttatgaccatgaggccaaacttgccgtgtgatacccctccaacgaaagaatcaagacaatgggtcgaggtatcattgttttttttaactccaaattttgacctttcggtatttttcgggtctttgcattatctgtgttatattacaggcccaaaatattttatttagacattgtgtttgaatttttttcatgtgttcaagctcgttaagactagatggggtataccaacgtagcggatgggacctacggcgaatggttcctagaattttccaaaaaagataaatacgattgcattgcatgaattaacggatgcgatcataccagcattaatgcaccggatcccattagaactccgcagctaagcgtgcttggctgagagtagtactaggatgggtgactcctatgaagtcctcgtgcagcttccctctttttttttttttggttaaaactatatgaatctataacttttagaccatgaggccaaacatgacatgtgataactttttggaaagcccaatgagagccatccaatataagaagcaagacaatgggtaagagtaccattctcttttttttaccccgaattttgacctttaggtactctttttaggtctttccatgacctttactatattaggggcccaaaattatttgttcgaaaattttttaaaaatatttttcaggtatcaaagctcgtcaaaactagatggggtatccttacgtagcgggtggaacccacggtgaatggtttgtagagtcttcaaaaaagaataaatattattgtattgaatgaactaacggatgcgatcatactagcactaatgcaccagatcccataaaaacttcgcagctaagcattcttgggggagagtagtactaggatgggtgacctcctagaaagtcctcgtgttgcatccctcttttcttttctttttgattaaaactttgagactttataacctttagaccatgaggccaaacttgccatgtgataccgtttggaaagctcaaagagatccttccaaccaaagaagcaggacaatgggtcaaggtacatctatttttttttttctccaaattttgacctttaggtactgtttggggtgtgtccgtgatctgtggtatattacgagcccatcagaactccgcagctaagtgttcttgggcgagagtattactaggatgggtgacctctcaggaagtcctcgtgttgcatccctcatttttttttccggttaacacgatatgactctatatcgtttagaccatgaggccaaacttggcatgtgatacccttttgcaaaccccaaagagatccctccgatgaaagaagcaggccaatgggtcgaggtaccattgttcttttttttactccaaatttgtacctttaggtacttttttgggtctgtccgtgatctgtggtatattacccgccctaaattatttgttcggatattgtttttgaatatttttcatgtatcaaaactcgttaaaactagttggggtatccatatatagcggcggaactcacggcgaatggatccgaaagtcttcaaaaaaggataaatatgattttattgcatgaactaacggatgtgatcatagcagcactaatgcaccagatcccatcagaactgcgcagctaagcgtgcttgggcaagagtagtactaggatgggtgtcctccaaagaacgcctcgtgttgcatccctctttttttttttggaaaaaattgtatgactctataactttaagaccatgaggccaaacttggcataagatacatttttggaaaggccaaagagagccctccgacaaaagaagcaggacaatgggtcgaagtatcattgtttttttttacttaaaattttgacttttaggtactttttgggtgtttccgtgatttgtactatattacaggcccaaaatattttgttcggacattgtttttgaaaaagtttcatgtatcaaagcaaattaaaactagatggggtatccctacgtagcttgtgggagccactgcaaatggttcccatagtcttcaaaaaatgattaatagattgcattgcattaactaacagatgcgatcataccatcactaacggatgcgatcacaccatcactaatgcaccagattccatgagaacttcacagctaaccgtgcttgggtgggattagtagtaggatgtgtgacctcccgggaagtccttgtgttgcttccctctttttttctttttggttaaaactgtatgactttataacttttagaccatgaggccaaacttggcatctgataccttttcggaaagcccaatgagagccatcctacaaaagaagaaggacaatgggtatgagtaccattcattttttctccaaattttgacctttaggtactttttaaggtctttccatgatcaatgctatattacgggccaaaattatttgatcaaacattgttttcgaataattttcttgtatcaaagctcgttaaaactagatggatatccctacatagcggatgggacccacggtgaacggttccaagagtcttcaaagaaggataaatacgattgcattgtatgaactaatggatgcgatcataccagcactaatgcacctaatcctatcagaactacgtagctaagcgtgcttttgtgagagtagtactaggataagtgacctccctggaagtcctcgtcttgcattgctcttttatttttactagatgagtacccgcaccacgtgcgggctttcactttatatttcgtaatctaaaagtatttaaatatgaaatttaggttagttttttaataggcaagaagacagaattcctatttgatactaagctccataaatcatcattttttttttgcattttgcatttaaattcctaacaaaatattttcttagtaaacattattttcagaattgttttcatttgtatcaaccttaaaccaaaaaaaaaaagacaatatgcgaagaagatcggagtacccgctctgaaattcatggtggtagtatttaagtaggaaaattaagcattgataatcgggttgtcgtttcgtttaaataaaaagggttattaagttatagtaaataggcaaatagaaccaaaccttgataagccttattaattttttgaaacataaatgtaaaataattttcttcttttaattttcattgttgccacttttgcaaaaacaaaacaaaataatacgaatttcataactgaaaaactctataactgaggatttgagtccaagaatttaatatattatatagaaaaagaacaacctatggaaactattagctaatccactataaaattatttaatcatattttgacttaaaatgataaaatttaggggaaaatatccaagagtatgagaatcaattaaataatttaatttaagaaaaagacatacaaaataagagaaaattatttttgatacaattaattatgtaaacttttataaaatatacaaataaataataaattaccataaaccattaacttaccttaattattaagtggacatgtagcaaaagctaagtgatgatgtgtcattcatataaagagagtttgccaactttcatatatatgatttttgtggttaaaattgtatgactctataactttaagaccatgaggccaaacttggcatgtgatacattttcgcaacgcccaaagggagccctccgactaaataaggaacaatgggttgaggtacatttttttttcttactccaaattttgacctttaggtgctttttcgggtctgtctgtgatctgtgctatattacaagtccaaaattatttgtttggacattctttttgaataattttcatatttcaaagctcgtgaaaactagatggggtatccctacattgcagatgggacccacgctgaatggttccaagagtcttcaaagaaggataaacacgattgcattttatgaactaatggatgtgatcataccagcacttatgcatcagatcctatctgaactgcacaactaagcgtgctttggcgagagtggtacttgagaccatgaggccaaacttggcatgaggccctctttttttttcttttggttaatttatgactctatatcttttagaccatgagaccaaacttggcatgtaatactttttggaaagactagggcgaaccctccaacgaaagaagctggaaaatgggtcgaggtaccattcttttttttttactccaaattttgacttttaggtaatttttcggatttttctatgatctatgctatattaccggcccaaaatattttgttttaatattttttctgaatatctttcttgtatcacaactcgttaaaattagatcgggtatctttatgtagcgggtgggaccaactgcaaatggttcatagagtcttcaaaaaaggataaatacgattgcattgcatgaaccaacatatgcgatcaaaacgtcgcatcagaaagtcgcagctaagcgtgcttaaacgagagttctactaggatgggtgacttctcgggaagtcctcatgttgcatcctttttcttttatttggttaagattatatgactctattactttgacaccatgaggccaaactttgcatgtaatacgttttcggaaagcccaaagaaagccctccgataaaagaatcaaaaaaatgggttgagctaccattgttgttaattttactccaacttcttaattttacgtaatttttgggtctttccgtaatatgtggtatattacgggcccaacattatttattcagacattaatttttaagtttttcatgtatcaaaattcgttaaaattagatggggtatccctacatagcgggagagacccacttcgaatggttcctagagtcttcaaaaaagaataaatacaattgcattgcatgaactaacagatgcgatcataccagcactaatgcaccgagtccctttagaacttcgcagctaattttgcttgtgtaagtttagtcctaggatgggtgacttcccgggaagtcctcgttttgcatcccttttgttttggctaaaactgtgtgactctataatttttagaccatgaggccaaacttggcatgtgataccttatcagaaatcacaaagagaactgtctaacgaaagaagcaagacaatgggtcaaggtaccattgcttttttactccaaattttgacctttacgtactttttcgggtctttccttgatctatgttgaattaagggcccaaaattgattgttcggacattgtttttgaatatttttcatgtttcaaagctccttaaaactagatggggtatccctacatagcgggtgaaacccacagcaaatggttccaagagtcttcaaaaatgataaatatgattgcattgcatgaactaatggatgcgatcatactagcactaatgcatcggatcccatcaaaactacgcagctaagcgtgcttggacgagagtaatactaggatgggtaaccaccagtgaaatcctcgtgttacatcacattttttgttttttggttaagactttatgactttataacttttagaccatgatgccaaacttggcgtgtgataccttttcggaaagcccaaagagagtcctctgacgaaagaagcaggatagtaggtaagagtaccattgtttttttttactccaagttttgacctttaggtacgtttcgggtcttttccgttatctgtgctatattacgggtccaaaactatttgtttagacattgtttttgaacattttcatgtatcaaagctcgttaaaactagatggggtatccctatgtagcgggtgagacccacggcgaatggtttctatagttttaaaaaaaggataaatatgattgaattgcatgaaccaatggatacaatcatacaatcactattgcaccggatcccattagaactccgcaacaaagcgttcttgggtgaaagtagtactagaatgggtgacctaccgggaagtcctcgtgttgcattcctcaattttattttattttttgtttaaactgtatgactctaaaacgtttaaaccatgaggccaaacttgtcttgtgatacctcttcggaaagtcgaaagggagccctccgacgaaagaagcagtacaattggttgaggtacattgttttttttactccaaatgttaacctttaagtacttttggggtctgatctgtgatctgtgcaatattatgggtcaaaacttatttgttcagacattgtttttgaataatgttcatgtatcaaagatcgttaaaactactagagttttcaaaaaaggatcaatatgattgcattgcatgaactaacgaatacgatcatactatccatcagaactctgcatctaagagttcttgggcgagagtagtactaatatggatgacctctcgggaagtcgtcctgttccattcctctttgtttttttttggttaaaactttatgactataacttttagatgatgaggccaaacttggcatgtgatacctgttgagaaagcccaaagggagcctccaacaaaagcagcaggacaatgggtcgaggtacattttttagttttactccaaattttaccctataggttttctcgggtgtttccttgatctatgctatattacgggcccaaaatgttttgttcgcacattgtttttgaatatttttcatatatcaaagctcgttaaaactagatggggtatccctaggtagcggattggaccgacggtgaatggttcctagagtcttcaaaaaggataaatacgattgcattgcatgaactaacagatacaatcattccagcactacgggaccgaatcccatcagaactctataatgacgagagtagtactaggaggtgacctcccgggaagtcctcgtgttgcatttaacttttttttggatccagaaccaaccgattggatggatccaatcaaactttatatagctgatggagaagtaccagcagatcggtgggaggcttgacatctaaggacaaaagtcgcgaactacatccttcatgagggtgaacacaaaggaagctatagttatcatgaaggaaacacatgacagagatgttggaaatcattctggtggacgtgctttggcactcaagattaagaaagaaggtcattattggccaactatgctagccgactgtgaagcatatgaggtaaattgcgaaccatgtcagcggcatggttagatgaaatatatgtcgcccaaaatgtttagtgatgtgacagcgttgtacctttttatgcaatgggccatggacatcgttggaccattgcccccttcacgttcaaagaaatacttgctggtgctaactgattactttactaagtgggtcgaagcggaggcctaccacgaattgaaatccctgcaggttgtcgcgtttatatggaaaatatcatatgtcgacacggtcttccctatgagatcttaacggataacagatcggttcgtctcgcttatcataaggcagttcctcaccaagtggaatatacgccttagcaattcaacgccgaggtatctgatatatccctattttcactgattttatctaggtcttagggttaggattttgagtctttatgttatttctcgagtctttttagtgtcttttcaggtatcctatgcattgggacaacaatggagatgaggagacattttggagcaaaaactaagaaaaaggaagctaaggaagattttcagttccagattaagaggagtgtcgatcgacacactactagtctcgatcgacacactactagtctcgatcgacactagtttcagcccagcaaagtcccagatgctttcaagtttacagaagaggaaatttgccccagaagacttctctatttacattattagtccttagatgttttatagggtttatatacattgtttaaacctaagttttgtttatcaagtttttatcaagctttttgcaaaccctgtttaagagagacataacctattcatcgattgttgtcagagattgattcagttcctaatacaatgaagagatcccttctttcccttaatctgtttgttgtgtttatgctttcatactcaataatgttgtttgctttaatcaatatgtctgagtaatctgcttgttaggaatagggtttctcattagggattcatatgatttagtagattgcccccttgctaggttatctataggattcttcatctttaattatgcttaatgctagatctagagtaattaactagatcttgaatccagacaatagatatgcccgccataggtatctgtagttggatctattatttgatgaggctggtttataggtgtgtaataagaatcggcctatctactaaggtgaacaatcgaactctttaagaatgcatttttaggttgataatttctcggcttctccggttattcttagctatagaaatagggagtttcgcggaacgccaccggttattccataattagagtttgagtttaagaatggttcgataacaccctagctttcactagatctactaaccaatagtttcctaagaataacctgttcctagctctttatttaatcgtttacaaccaaatcaacttgctgttttcttactttgttctctactatttcattcatcacctaccagcttaatcttgacattgaactcattatttgaacaaaagaacttcgtgaattcgatccttaaatactgcaattgatctcttatttgagagagtagttctagggtaatttgaaccttatcagtgacctcaaggaaacggaccaacggaagccacgaataaaataatcatagcgaaaaccaagaaaagactcgggccaaagaagggaaattgggcaaacaaattggatggtatacaatcaaaacgtcaaagaacgccgcttcaatgtgggcgatttcatccttcccgaagtcttcagtaacacaaaagagaagaatgccggaaaactcggagctcgttgggaagggcctcacatgatctcgaaggtggttcatcctacggtctacctaatcatgactatgaagctcgaggaagtgcaaaacccgtggaacgtagtccacctaaagaagtattattactagcctctagtttacttttgcaataaaagaaaaagaaaaaaaaaaagatcggtactctgatctcctattatgtaacttgaactatgaaaggcttgatccctttaagggtgataagtaggtttttacgcctacttatgtgctgaagtgtgatgtgttcagttcaattccccttaaacactaacatgtcgatgcagctatagggggtgtcaatccaatccactgttattgctagcaatcaagatgtgtacagaagcaactaagtcaagccagattatagagatggttggtttctagtaacaatcttaggtcaggattcaaacaacaaaaataaaaactgaaaagccctactcgatcattgggtcgagtagaaccgacaggcaacaaatttaagtactaaaatgcaatcaacaggtgacacaaataacaggtaaataaaagtgcaaacatggggtgaacacaaataaatctaagaagaatagaagtcgtaaggatggattcattgataagggcaactctagtgttcatcaggtggctaacaggtgaaaggcaaatatcctagacgatagattcaaaaatcgggtcaatccactctcgtgaaagagacccccataactctaacacttcctaatctcaactctcgttcatgaaacatagcagagcagggtttaagtaacaatctaccaaagccaataagcagtctagccaatctctttagtcgttcacatgtgtgccctcacgtgttaagctttgactaacccaaaaccgaagaccttctttcttgaacagaggcttcctatacttaaggataatttgcatttgggtcacttattcacacattatttggaatgatcaattacaaaggttggaaaaatgctgagggtgtcgatccagtatgcgagttcccctttatttactctctaaaaagaataaatctgggaagagaaagaacaccaaagaaaaaaatatatataaaaaaatggtcaatttattatggtatagtacaggaatgagtctagaaggatcttgaatgttagcttgtttgatgagacccagcgatgaaagcctggtggatatagttatggaacttaggtatgaaatctaggatgttgagtaagcttgcagagaagtacatgttggttaggatttgattatacttgttaggcatatggacttagtttggatgatcatggcaataggctagagaatgttgggagttcctttgttttcaaaacctcttccacgggtttggcttttgtgttttgcttgagggcaagcaaaaactaagtctgggggagttgatatatccctagtttcactgattttatctaagttttaggtataggattttgagtctttatgttgtttcttgagtctttttagtgtcttttcaggtattctatgcagtgggacaacaatggagataatgagatattttggagcaaaagctgaggaaaaggaagctaaggacaattttcagttccagattaagaggagtgtcgatcgacacactcctggtgtcgatcgacaccagttacggccgagcaaagttgataatatatttttagtcaattattcctaaaacaccaatcatgtcattgtagtattttaggtgtcaatccaaatgggtgtgatgcaaacagatgagatgtgatcagaagtctctaagtcaagccaagcaataatagatttggggtttctaacagtcctaagcgaacatgcagaaaacagaagcaataacagaattactaaaaaatcactcgaccacaacaggctgatgccagaagtaggatgtggtcgagtaacaggtcgagtaacagacaggatatgaaacagctatactcgactgcacagtctgttgccagacactgggtgtggtcgagtatactggtcgagtgattgtaaaaactaagaaacaggcaatgagaacgattaagcgataacgataaaacagagaaatagggtagacgagaaattcctaaggatggggtaatcgagtagagtggtgtcctagcctattcgaatggttaacaagcgcaatcaagctatccctagacaacaggttcaacaacagatcaatccactcccgtgatagaaatcctcaagcaaagctagcccaaactaattcccattaacggaatctaactatgcaggcaatacgaacagactgataaagtcaataaacgctctaaacggccaatcccttgggatagagacgcatatctcaggaactagtggatcaagcattccatcgaacaccttctgggtgcgggaatgcttgggatcgaattccagttgatcagaaagaaataagcagtaaacgcaactagtcctaaagggattcaatcaattctaaaacttaaccattctatagactacggattccacaactactctatcccatccctaagaattctaagtcactactcagacagcatgctcaaagacataaacgcaggtaaacgataatattgcataagtaaagagataaagagtagagaaacaagatgactaatgaaatcaaacgcggaatctcaataacttggaaaaatcgcgaactacaggttgcagaagcaaaagcggcgtagtagagtaaaactgaaaataaaactgaagcaaaaacgcaatgtcgactagatgttttaggacagaaccctaaaacatctatttataccaaacgaaataaaatgatagtagacgggccaataacctaatcgcccggcccatagagtgataatgggccgagatgggcttcgtgatccgatggaggtccaggccgcttccaaacactttgtcttctcctcttttctcccttgtgctcagcttgtctggttgagtgcggatttgagtagactgtgaagacgtgatcgagtgtccggtcgagtgatggtgatggtggtgagtgatgatactcgaccagggggtcgagtaacgtggtagagtgaatggtcgagtgtggtcaggtggtgtggcgaagcggtactcgaccgggggtcgagtaatgtcgtcgagtggcctgagctgaggttactcgacctggtggtcgagtggacgggaagaatggctccaaagtcactcgacctgggggtcgagtatgtgggaagaatggctccaaagtcactcggcctgggggtcgagtatgtcttctggttctggctcgtttcttccaatttgctcgcaaacagctccaaatcacctgaaaacaactcagaaatgcaatatgtatgcaaagctatcctaatcatgcaaagtgtgcaagaatgatgagaaatgatataaaacagtgatgaatgatacgaaactagactcaaagtgatgatgaatagacactgaaaacatgcaaattatagacatatcaactcccccaaacttagtctttgcttgccctcaagcaaataagaagacatagttgaaggagaggagtgaaggcggggactcagaaccaaagcatatgatagagcaaataaaatcaatgtccaagttggtagttctaagatgcgatatgattgaattccactcaaaaacgttagccatgccttgttatcaataaatccgtctcttatactcgacctacacatgttttcaaatctaccaatccctttaacattcattagttctggaacgtgaatcaagcaatgcatcatcaatgaactcatttggctaaggtgaaggtcaagagacaaagatggtcccctacagaataggcttaagtaacaggggatccctcaagaatgattgagctttagtagaatgctaaaggtaagtcccaagttatgcatacagagataagatcccatctacccagagtataacaatgaagctctaatggtaatcccaactcctgtcccaacttaactctaccctttgcactcatgaatctttcaaactctttttcatatcattctttttttttttttctcttaactctaggagaagctttctcaacgctcttgatacatctagcgggtttggacttctttaacaactaaggttcctgtttttttttttaaaaccaaaggcttttaacctttcttctttagctaacaagaacctcattcttttctttaacattcccaacacctttactagatttttttctaacttctttagcttacttcccctagaattctttccctttcctcatcaacaatggattccctcttttcttttaaacacatcccaacccatgatataagcgcccacctagtcctatccagtctgaagaacgcgaactagaactacatgagacactatctctgtcgttacgaacctaacactttctaccaagctcaatcgaaataagacctcacaaacactcacaagtgatatagggcttgaaagaaagttcaggtttgggtatgggttaactgctctaataaggagagtcagctacttggatcaacaagagtggttaaaatgagtaagaaaatccaagtattttagggtatccatgagttcaaattcgattccaagacatgataattctaaatcagattcaagttcaaattgatagggaatgatatcagatcctaacagtgtggtcgagtagagcaatctaggcatggtgcagttcttacttcaatttcaatgacaacgcatcaaacaactaacaacgagggcaccgagcttatctggtgaaccaaaatgcttacaaggctatctcatcattatcccctatgcatatgcaacaatcctaaacgaaacactctagactcgatcctaaatgcaatgcaactacatgaacactctatttttgtgaaatcattttctggaatttttcaatttttttggtttttctatgccttagatgaatgcagactcaagattatacaatgcaacacacacttcctgagccctcccccaaacttaaatcacacagtccactgtgtgaccaaatttggaagagagtactcaggacaaaaacacatcacaaaaactaaataaaaacaagagatggtatattacaatggtggagtgaggtgcatacctcagtggaaaaaggagcggagttggtcgtcaatagctgcctgtgattgctcccaggccatcgaagaatctccctgttgtgtctcagcttccccctgggggtactcgacctctgctccttcgtcgcggccagcaccgctctgatgatactcgacctctcttcttctgctgcggccagcaccgcggtcgcgtaagctacgggactggagaagtcgtgtactcctgctgccagacctagcgagtgcagccttcttctttctcccgagctcccgaggctcgaatgatgaatgccttgcagggactggtggtactactcggtcactaggctcaggcctgtggtgacttggctcaggcctgtgatgacttggccccggcgcgtcatatctcctcgaaggcatgtcctgaggacgctctccctgcggaatagctgtggtagaagagaagcaacttatcttgtccgtcagaaacgtgatggccttgaagcacttgataagtaacctatcttgtttcttgcaccacctctgcaacttactgttgtttctgtgagcttcactcaagctcttgctctcccgcgctggaggtacgtgctcactgaaatgatacatgctcgtatcatactcctcctccctatcctcatccgtctcagcaaaatcatcctctgtagcttccgtcgtagggacattgtcatcagtcggtggagtgctctcaaagtagaggtaatcacgcgcaggtctgaagtcaatgttctcaccctgaagtatggttgtggcctcgatgcagggaagcaaaatgttggctgttcgggtcagggagtgctcgaatttgtagcgatagaaatctccaaccatgtcgtactccagaaactcacaacgacgcaagtgatctaaatccatcatcctcggatcaaaccctggagacgtaagaggtacaccacatgcaatcagaatcggtgtcacaacgccacctacacaaagggctcctcgcaccttcttctttccgttggtgtgcgcccacttcctgtatccacacaggtggatcaacagaagcataaccggtggtgtatcattgaggtcgccctttaggaccttcttcccctttgttctccggagaatgcccttgagtgcagaatcaatcatttccatgtctgtgttagacacggtgcccgtagattccctggggtacagaacattcgctattgagcgctgatagtaacggatcacagggcttcgaatctggttgctcttagaccttgcagagttgagcgccaaatcgttcccaatggttaaccacaaatcctccaactcttccctctcgaacttgggtttagttccctttccactaggaaaaccaaataatccttccaagctcttgatagatagctggtaacgctgctcgttaactgaaaaagtcaagaaccccaacccttcactctccagttcatctgcagtaagtccctgatacaactccacttgcagagtggagataaactctattgtttccttcttgtaagcgacgtacgggtaagacatcagcgtctcaagatggcacttctcgaataagtgctgtacgtcctccagtagcccaagctgggctagagtctcgtaacaggggtacctcgttccccagaagtcgttcagctcgaaaagtctgatgtactcctccactgtaacttcatcaggcttgttcaacagttttgtttctctgtgccatgactcaggctcatactcgacgtcaatatcttcgtcgatcaactcatatctgctggtcatcgctctctttcctctagcaatctcagctctcctttcattgcgtcgagctactgagcgttgggtctcggctctgaagctctcataagcctgttgctctctctctggtctagttgaccaagattcagcttcatcgacgttgtaatccgcatccatggaggattcgccactgtagttactcatattgattccctgaaaaagaatgtaactcaaaaccaaatatcaatatgttagtttaaataaacacacacactaaaccagtcaagtacgcggtggagtgaaacggtcgagtaaacggcgaatttagagaagacggtggcggtttgaggagtagtcgagtaaagagacgaatggaggcgcagtgaatggcgaggtcgagtgaatggtggatagttgagagatggtgaagccggtccggtggtcgagtgaacggagatgacggaagcacggacaatggcgagaaactccggcgaagatgttgaggcgaagtgtgaagtggtcgagtgaaacgagagacggtgagagagtatgcgaagctggaacggcgagaagctccggcgaagtcgagtaaatgaagatgaagatgaagcacggagaggtcgagttgcggtcgagtggtaaggaggcgacggtgagaaggaagaaatggcgaaatcgagtaccatcgtcgagtgaaggagagagtgaaggaggtggcgcgaacggcgacggttgtttcgaggtagagtgaaggagggagacaaagccggaggggcgagatcgagtgaacggtgaggtcgagtgtgatggtgcggtcgagtgactgaagaggaagagatatggtgaggtttggtcgtgcgtgtgaggatgaggtcgagtgagggttgtgaggaagagagatagtgtcggtggggagagatagggttagatcgagtggatgagatggagtgctgggattttcttatccttagaaacgcttggggaacaaaagtgagaggtggtgggccacgctctgtctgtttgtcctgaagcattgtttattgttgtctaggaatgtctcagagccttctgtaatcctctgtaaatttgataagctctctgtaagtctttgtagcttctgttggtcgagtataaatatgatttcaaaattttgagtttttaaaatcattactaatactcgaccaaactactcgaactcatggcctctgagtgcaacagaggttttttcaaattcttgaatttctgaaatactcgatctcctgttgctctgtagagtaaaaattttaaatttttactctacctccacgctgtttctctgttcctgagaatcagaaacacaaccaaaaacagatcaaaaataacgagaaaataaaagttttatttacagaaacagtcttgggaattcctcccaagtgagcttgtttaaagtctctagcttgactcctcacactcattaagaagaaaatgggtgatagagagggtctgcatagtcctctctaatctcatcatcatattcagcatcctctcttgagagatgagttgcagaatactcaattcttctttcctcgaaataggcttctttctcttctggtggataatctatctcttcagaccatcttgaagtaatctttttcctcgggatagtgttattcccgcatttggatttagctatctcttgcatctgatccagtttactcttaagttgctcaactgtctgagctagcttctctatggtctcttcttgctcatcagatttctttttgagatttcgcaagtcgggtgtagaggctgtgcttggtctagcgattgaattcgaaggctgaggttgagccctgaccttttcttctacagctgtcctttgcgaggttttattgatgtcaaactggagcttgatgtgcttcccaaggttgagacttattctcccatctctgacatctatcatcgctcccactgaggctaagaaaggtcttcctaggattagaggatccttaggttctgcttccatatcaagcacaacgaaatccgtaggcacctccactccattaatcattagtggcagatcttgtagaaggccgaagggttttcttgaagacccatcagcaaggattaaagtcaggtcgcaaggtttgtactgagtgaattccagcttccttgctactgagagtggcattaggcttactgaagctcccaaatcacaaaggcaattgctgaaaaccaattgaccgatggaacatggtagagtgaaagttcctggatcttccagtttttcttgaacactcctcttaacagtggtcctagacgggatagcatcacattcgtcttctgaatcttgatgaatcttgatcctttctagaattgactttctcacatctttgtgaggatccgggattaggttgagcacttctattagaggcatcaccgcttccatctcatcaagctgcttctctgcaagagaattgtatctttctatccatgctttcctgaatttccatggaagagcacgtgaaggtaatggtgctggcttgaatcgttttaccatcctctcaatgatggctgctttctcgtctaggttggactgtgtttgaaatcgggatcctgctgaatggtcgagtccaaccactgaaatttcaatctgagtagaaacctccccgtcttgaacatcactgtcctcggtgattgatgtggagacatgtcgagtaggcagctctcgatcatggcagatggtgatagcgtgagcggtggcgtattccttcgggttctgtatggactttcctggaagtcctgttacttttggagcagaagttgacgctgtttgtccttccatgtatctgaccttagaggtaagtgcctcaagtttgatattcagatcgttgaaagtacaatcaaccttgttgtggatttcggccatctttttggcgagatccattgctcctgcagcttgcccttggagaatctgctgtaacatgttcttcaagtctgaatctggagttgttgaagctggttgttgttgctgctgtgtgaacccaggtggtggaagttgctgctgatagttgccctgatactgctgcttaggaacatacccttgaccttggttgtatggaacaaagggcttgggttgattctgctgctgtgaagggtaaacttggtcctgcgggtttgcaacgtttgtacttctgtaagacagattgggatggttctgcttgaagttgttgaaacctttgttgtaacctccttggttctgcacataactgacctcttctgattgcatagtctccccatcctgaacttggaacgtctcatcatcacccagaaaatgaatgtgcttctgttgcgcaagcagtagcttgtccagtttgtcattcatggctttcatttccctgcggtgcttctcatcagaatcagagctggtgcggacgcttctatcataatcttcattatagttgccatccgactgagctaagttctctaccagctcccatccgtcttcaacgtctttgttgagaaagttcccgttagaagcggtatctagaagcatcctgatttttgggaggacacctctgtagagagtgctgagaagcgaagctttggagaaaccatgatgaggacattgcgtctgataacctttgaagcgctcccatgcttcgcagaaagtctcattattcgtctgagtgaaaccggagatatcattccttagtctcgcagtcctggagttcgagaaaaacttagccaagaaggctttcttgcagtcattccaggaggtgatagagccttgaggaagcgacttttcccactgatgggctttgtctccaagagagaaaggaaacaatctgagcttgaagccatcctcactgactccattgatctttgttaggctgcagagcctatcaaactcgtccaggtgatcgagtggatcctccatagggaggccgtggaacttgttgctctgaaccatggcaatgagaccgctcttgatctcaaagttgttgttctgcacaggtggaggcacgattccattacgctgattgtggttgcgtggtgcatcgcctgcacctatgttgtttggttgcacctgctcatcaacaactgcagccattgtgtctgtttctgtctgtgttctgagttggcgtgcaatacggtcgatgttatcgttgaacaggagattctgatatcctcgtgaccgtgtttgcatacaacgagtaccaactggtgaagctagtgatccgtagtacctaaatcaaaacagacaaacagaaataacacaaagttagtaactttcagaaaaaatgaaaaagaacttgatcttaaatattctgaaatctcaaatatagcaaacaaacacccaattggcaacggcgccaaattgataatatatttttagtcaattattcctaaaacaccaatcatgtcattgtagtattttaggtgtcaatccaaatgggtgtgatgcaaacagatgagatgtgatcagaagtctctaagtcaagccaagcaataacagatttggggtttctaagagtcctaagcgaacatgcagaaaacagaagcaataacagaattactaaaatcactcgaccacaacaggctgatgccataagtaggatgtggtcgagtaacaggtcgagtaacagacaggatatgaaacagctatactcgactgcacagtctgttgccagacactgggtgtggtcgagtatactggtcgagtgattgtaaaaactaagaaacaggcaatgagaacgattaagcgataacgataaaacagagaaataaggtagacgagaaattcctaaggatggggtaatcgagtagagtggtgtcctagcctattcgaatggttaacaagcgcaatcaagctatccctagacaacaggttcaacaacagatcaatccactcccgtgatagaaatcctcaagcaaagctagccaagactaattcccattaacggaatctaactatgcaggtaatacgaacagactgataaagtcaataaacgctctaaacggccaatcccttgggatagagacgcatatctcaggaactagtggatcaagcattccatcgaacaccttctgggtgcgggaatgcttgggatcgaattccagttgatcagaaagaaataagcagtaaacgcaactagtcctaaagggattcaatcaattctaaaacttaaccattctacagactacggattccacaactactctatcccatccctaagaattctaagtcactactcagacagcatgctcaaagacataaacgcaggtaaacgataatattgcataagtaaagagataaagagtagagaaacaagatgactaatgaaatcaaacgcggaatctcaataacttggaaaaatcgcgaactacaggttgcaaaagcaaaagcggcgtagcagagtaaaactgaaaataaaactgaagcaaaaacgcaatgtcgactagatgttttaggacagaaccctaaaacatctatttataccaaacaaaataaaatgatagtagacgggccaataacctaatcgcccggcccatagagtgataacgggccgagatgggcttcgtgatccgatggaggtccaggccgcttccaaacactttgtcttctcctcttttcttccttgtgctcagcttgtctggttgagtgcggatttgagtagactgtgaagacgtgatcgagtgtccggtcgagtgatggtgatggtggtgagtgatgatactcgaccagggggtcgagtaacgtggtagagtgaatggtcgagtgtggtcaggtggtgtggcgaagcggtactcgaccgggggtcgagtaatgtcgtcgagtggcctgagctgaggttactcgacctggtggtagagtggacgggaagaatggctccaaagtcactcgacctgggggtcgagtatgtgggaagaatggctccaaagtcactcggcctgggggtcgagtatgtcttctggttctggctcgtttcttccaatttgctcgcaaacagctccaaatcacctgaaaacaactcagaaatgcaatatgtatgcaaagctatcctaatcatgcaaagtgtgcaagaatgatgagaaatgatataaaacagtgatgaatgatacgaaactagactcaaagtgatgatgaatagacactgaaaacatgcaaattatagacatatcaaaagtccatgacgctttcaagtttacagaaaaggaaatttgccccagaagacttccctatttgcattattaatcactggacgttttatagggtttatatacattgttttagacctaagtttcttttatcaagttttttgcaaaaccctgttacaaagagacataagctattcatccattgttttcagatattcattcagttttgaatacagtgaagagatcctttctttccctcatctttattgctgtgtttatgttttcatactcaattatgttgtttgcttcaatcaatttctctgagtaatctgcttgttagggaatagaatttctcattagaaattcatatggtttagtagattgccctcttttctaggttatttatagaattcttcatctttaattatgcttaatgcaagatctagagtacttaactagatcttgaatccaaacaatagatatgcccaccataggtatctgtagtttgatctattatttgatgagcctagtttataagtgtgtaataagaatcaacctatttactaaggtgaacaatcgaactcgttaagataaaaataaacaaacgagaagttgcgataagaagataccaacataaaaaataactgtcaatcaaaaagttatgatgaaaccacatgaatgaaaaaagtaaccgtcaatatgttaacagacacaattgtttacgatgaaaatacaattttatgagaagttactataaaaaagacactaacagaaaaaataaccaccaatgttaaccaaaagtgacgatgaaaagaaatgaatgtaaaaaagtaaccgtcaatattttaacagacacaactatttacaatgaaaagacatgactgtaaaaaacgtaactgtcaaaattttaatagacacaactatttacgatgaaagacacgattgtaaaaaagtaatttttaatattttaacagacactactgtttacgatggaaatacagttttacgagaagttacgataaaaagacactaacaaaaaatataaccgtcaatgtttagaagagatgctatttttagaagaaaattatttttttactgctacttttgtcaatctcccttttttgcaagaaaaaattttggcagaaaaattttgatataaatattttgtggcggaaacatatttgtcagtaatttttggtgattaattcatgtattttttgaatctttttgttttgaattttaataattaaaattaaaatatttatttgaatactatttttggaattaaaaacttttgattgcaatcctatggacccaataagatcatactcaccattgtatggatatagaagtatagtatctactctacctttggttaataaaagacttattaaaagagtaggttcaggagcgtcaattttggtatcgaatgacccatggatacctgctcagtccctttggtatgtgcattacatttgggctcaccaaatagacttgatgtcatgggttgacattttacaaaatccagaaaatataccgtaaagtctgactattatacaaaaaatgatgaagtaaggtggaaaccaaagtcgcttctctggcccaaataccaagccttctcaagcctacttttggaaagttcaatgtccacagaaacgaagacattttatttggctagttactataaaaactttatataaattaataatactaggactgtaaaatttattaatttagagaagtattaattatagaaagatttttctaatttagtaacttttttaatttttctatgaaaatatataattgatatctctataatttgcataatttaggctttcattcttcacctctttgccattgtttcatccatattttatctcattagtagttaatttagtatgttttgcatacttaggacgattttgcattaggattgcatgtgcattgcatattggattgctttcaggtactttaaatgctttttgtgttcaaacagaggagaaattgaacaaaaagtcaggatgctgaattataccctcatccaaagtactcgatcgcaaccttagaggcctaataagggaaaacactcgatcacaattccggagaagctagcagctcattttcactctatcgcgaagccaaaggaatcacccaccaaaccactcgatcaccagcaagcccatctactcattttacacagaaaagaagagaagctgaagaaaccactcgatcacaacctcaagacatccactcgatcgcaaggtcgctggaccattccatcttgtccactcgatcgcaagacggagtccttgaagcccagtttgatccatgacatactcaatcgcagggaggcccattttagcccatcagatgctcgatcgctgcgtcccaacgtgaagattactatctatcgagtttcctatttgtttcatttcgcttttataaatggcatctaggggttttccctagggtatccatcctttatcttattatcatcttttttgcaaacttttgtagccgcagaaatctccggcgattttgtagtcactttcaagtatttgatagttcagttttcgtttcatcctttatcatgttctcatttgttgcattgctattgtcttttattacgtctgagcaatgaactgtatttctgaggatgggatagaatagttgtggtgtccttagtccctctaggtggttgagtttagaatattagagtctcttctggattagttgcgcttattgtttgttccttcttgatcaacatgaatatgaatcaagatattcccgcactcagaaggtgtttgatggaatgtcggatctattaattccaatgatattcgtctctatcccaagggattggccgtttagagcgggtattggctttaacaaattgatgttatatagtctacttagttagaaatcgctactggtgattaggtcggtgtctagctctctgcttgaggatttgatgcacggtagtgaattaatctgttgttgaacttgttgtttcgggataacatcggtgaagttttgtcaaccgtctaagtagattaaggagaccacgctattcgattaccccatccttaggaatctctcatccatttgattgtttgttatcacttttgctttgttattcatctcccttttattgtcatttcatattttagtttcatttcatttctgttattgcacattaagactgttagaaaccaacaactctctgcttggcttgacttagtgcattcttatcatatctcatttgtttgcatcatacgagattggattgacaacctaaaatagtacaacgacacgatagtattttaggattaattgatacgaaacacctattatcaatttggcacccttaccaatttggtgtttgtttgctatatttgagatcattagaattggtaagatcaactttgtttttgttacaaaagatactgtcattttgcttttctctctttgtgtttcaggtacccagcaacagctttacaaactcatatctaataggtctgctaacgctgagctaatacctgttgtatgcatacacgttcacaaggaaatcaaaaacgtcctattcaacgataacatcaaccgtattgctcgccaacagagagaacagacaacaacagactaaatggctgatgttgtagatgagcaagtgcaacccaataacattggtgctggtgactttccacacaaccccaaccaacgtcatggcattgttccacctctagtatagaacgacaactttgagatcaaaacggtctcattgcaatggttcaagggaacaagtttaatggcctgccaatggaggatccgctagatcatctagaagagtttgaaaggctctgtagccttactaaaataaatgaagtcagtgaagatggtttcaagcttcgcttgtttcccttctcacttggagacaaagcccatctgtgggaaaagacgctaccccagaattcaatcacaacctgggatgactgcaagaaagccttcttggctaaattcttctccaactccaaaactgcaagactctggaatgagatatccagatatcaagcaaacggaaaccttttgtgaagcttgggaacgcttcaaagtttatcaaaccaaatgccctcatcatggctttaaacaagcttctcttcttagcacactcgcactagctctgaatctgatgacaagcaccgaagagagattaaagttctcaatgacaagctaaacaaacttctccaagtgcagcagaagcatgttcaattcgtctcagacgatgaaccattccaagttcaagaaggggagaatgatcagtgtgctgaaatcagctatgttcagaaccaacgtggctacaacaagggatacaacaattatagaccaaacccaaatctgtcataccgaaccaccaatgtagccaacccacaagaccaagtctacccttagcagcagtagcagcaacaacccaaacagtttgttccttacaaccaaggctaggggtttgttccaaagcaacagtttaaaggaggatataaacaacaacaacaaccaccacctggtttcccatcacaacagcatcaaccacattcacctcaggattatgatatgaaaaccatgctctagcagatcattcaaggacaagcaacatgagcaatggaaatcgcaaagaagatggccgagttaaacaacaaaatcgaccacaactacaatgaacttaataacaagttcaagtcattgagcactaggatacgatatatggaaggcatccccgattcaccatctattacctccaacccaggctagcttccaaggaaagcaatccagaatccaaaggagtatgccattgcccatgcaatcacaatcaaacatgatcgagagctgtcaacttgacatgtccctacatcactcactaaggacagtgtgattcaagtgggggaggattttttataaggatgatgttttggctcacaatcaaagagcacatactcaacaatcaacccactcgaccacaagctccgccagctactaactctgttgaaaaaccggtagctacaaagaccaaagatacagtcttcgttccttacaaacctctgcttccattccttggtcgattcaagaaagttctagttaagaaataccaagacctcctaaaaaaacagataaatgatcttgaaatcactatacctttagtggactatctcgcagtgatacctgactctcacaagtacatgaaagacctaatcacagctgatataacccgatttttactgattttatttatgttttaggtataagattttgagtctttatgtttttcctcgagtctttttagtgtcttttcaggtattttatgcaatgggacaacaatggagataagaagacattttggagcaaaagctaaggaaaaggaagctaaggacgattttggttcaggaatcagcgaggagtgtcgattaaatttgacagaagatcaaatttgctccagaagacttcactatttgcattattagtccctgaacgtttttagggtctatatatattgtttttagacctaagtttcttttatcaagtctttttcaagttttctacaaaccctattactaagagacataagctattcatcgattgttttcagagtttcattcagatctatatatacagtgaagagatcccttctttccccttctctatttactgtgtttatgctttcacactcaaatatgttgtttgcttcatccaatatgtgtgagtagtctgcttgttaggaatagggtttctcattagggattcatatggtttagtagattgccccctttgctaggttatctgtagaattcttcatctttaattatgcctaatgctagatctagagtaactaactagatcttgaatccagacaatagatattcccgccataggtatctgtagttggatctattatttgatgagtctggtttataggtgtgtaataagaatcggcctatttactaagatgaataattgaactcgttaaaaatgcatatttaggttgatagtttctcgacttctccggttattattagctatagatatagggagtttcgcggcacgcccaccggttattccatatttagagtttgagtttaagaatggttcgataacaacctagctttcattagatctactaaccaatagtttcctgagaataccctgttcctaactctttattaaatcgtttacaacacaatcaatctgctgtctttttactttgttctcttttattttcacttataccctgctagcttaatctcgacatttaactcactgtttgaacaaaagaactccgtgaattcgatcctcaaatactgcaattgatcccttatttgaggaagtagttttaggtcatttgaaccatatcaaatttggtgacgttgccgaagttcttgggaatcatcattgagttttgtttagagatttcgtctagtttttacttctattttgttactcacgcgtttcttgttttcttcttttctgtctttcaggtgtatgtctaggcaaacaaggagcacaaaatagaaggagcttatcaacttgtctgttctggacttgggaaaacttgaacgcaccaaccgaaaaactcagaaattagcaatggctgacaaagtcatcagagctgatgtagaaggagttttgagagatgaggatgggcaagccaacaatgaagcgggtcagagattggatgatcatggactcatcctacctgaggacgccaatgaggatcaggcgcgcctcaatgcgcaattagctgctcgagatgcagcaggactcggtgtcgagcgacaccaactgggtgtcgatcgacactatcaggagcaacacgcgaatgcaatcggtgtcgaacgacacaacagaggtgtcgatcgacaccaacaccagattcctgcagttgcggaaccacgtcgtacacttggggatttcaaaaggccagacttgttttatgctaatcgatcagcgattgtacccccaccattccagaggaacgactatgagctgaagcctggctactttgctttagttggccatcatccttttcatggcttatctcatgagcagccaatggatcatatcaaaagatttgaggatcttgttttgagcatcaaggctaatggagtctcagaggactacctactgtgcaagctcttcccttattcacttgttggggaagcagcttcttggctgaagcaacttaaagcaggttccctcaagacttggagaagcatcaagacagcattttagaacaatttttacgatgatgctaagtctgaggagtttttaaggctgtttgggtcccaaggtccgaaccggtctcaagaagtgacgcagacgtccaattctggtggagggtctgagggaagcaggcccttccattggtcttacactcacgaccgtgatcatctgatcattaaggacgaggctgggttggcgaatctgtttcgccacatcaaagggaagatctgctttccttgccggccacagtcctgctaccgaatcctccgactttttattctcccgagagggagagagtttaatggtgagtttccggtgttttctgtgtgtttaggtgtctccaatggtcctgggcgcccttccttatataggggacgaatagatgcttcccgaatcaatacatccgttccttgcaccttaccgaagagttgcacctttccgaagagttgcacctttcctaagagttgcatctcttcgcccgtaactgttcgcccttatccaccctttgggcaagcaaccgttcgaccataaccgcccagctagtcggaaagtcgaccagctacctcgagctcaaccgtcactcgtccagctgcctcgagctcaactgtcactcgtccagttgcccgagctggactgtcactcgacctgagtaaccgtcactccttccagctgagcttgagcttcgggcgagctaacccagctgatttccttacgatcctagcttagctcgcatgatttaccctttgtccgagcgtatggtcagctccttctcacttgtccgagactccaccttcttctctttgaccaagtcctagacaacgatcctattgaggatcgcgggcgttacaagtctcccccccttgaattggatttgtccccgaatccgcatcaagttgatctttacccatctccttgaaccactccagaaaattggccttcatcttattcttggtttcccaagtgtatttttcacggcctccataattccacaagattttaacaaatcccttgattttccctgagtccctttcttcattcggtcaatgatccgtaccggccatgcttccaccgtcatgttctcctttacccgagaggtacatcttcctgatcacttaaacacttccgtagttgtgatacatgaaagacgttgtgaaacgcgtttagttttggaggaaggtcaagtttgtatgccaccgcccctactcgttggatcaccttgtacgagccaacataccttgggcttaactttttccttgaggtgaatcgcccctttgtaggtcatcgcctttaagtacaccaaatctcctacttggaatgccaattcctttcgacgcttgttggcgtagcttttctgtcgatctgtggcttccattaacttgatttttaagaacttcattctctccgtggtttcttccacgattgtaggtccgaacaaccgatgttcgcccattggcgtccaacacaacggtgttctacaagctctgccaaacaacgcctcatagggagacatacctatactagcttaaaaactgttattgtatgcaaactctactaaccttagatatttctcccagtttcctccccaattcaagacgcatgccctcatgtcctcgagggtttgaatcgttcgttcggactgtccgtccgactgtgggtgataggcagtacttaggttcactcgagttcctaaggccttttgaaaagccttccaaaactttgacgtgaatcttgtgtctcggtccgacactatactaaccggaatcccatgtaaccgcacgatcttgtctatatacttctcggcaatgatttctgctccatccttatccgagatcgccatgaagtacgcagacttagtcaatcggtctaccacaacccttaccgccttgtgtttggacttgatccccctcggtagtccagtgacgaagtccatcgttatatggtcccacttttattccggtataggtaggttttgtagcaacccacttggtaattgatgctccgccttaactagttgacaagtcgggcacttggccaccaatctggccatctctttcttcattcctacccaatggtagtaccttttaaggtcgcggtacatcttgttcgacctgggatggattgagaacttcaattgatgcgcctcttttaggattttctcctttaatgccctatcattcgggacacatactcgaccgttcaccacgattgtaccattgttcgaggtttggtacttgttcttattgtttagtgcccatccttttatctcctcgtcccgttcctgagccagccggatcctactaagcacatcggcctgatcaacagctcccaaccctaagggttcaacttccttagacaaggcattcacatacaatgtccccatcatgttaaccaagtccacttggttccgctccgcttccacttccaagcgcctcctactcagggcgtcggcgacttggttggccttgcccggatggtacgctatgtgcaagtcgtaatccgccacaagtttcatccaccttctttggcttagattcaactccggctgggtaaatatgtattttaggcttttgtggtcaatatagatttgaaccttagcaccatacaagtatgatcgccaaatcttcaaggcaaatactaccgcggccatctccaaatcatgcgtagggtagttcttctcatgtttccgcaattaccttgatgcgtatgcgataacactccccttttgcatcagtacgcatcctagttccactatagatgcgtccgtataaaccgtatagggctcaccttcctccggttagaccaatagcggtgcattagtcaacatggcctttaactccaggaagcttttcttgcactcatccgactagttgaatgctatgtcttttacggtcagtcgagtcaagggttgggccatgctcgcaaaactcattacgaaccttcggtaataccccgctagtccgagaaaactcctaatctcggtggcattccttggtcgtggccactcctttatcgatcgtattttctctggatcaaccgttgatccgagataatatggccaagaaaaccaacgctcctttgccaaaacgagcatttacttaacttcgcaaatagctcatgttcccttagccgttccagcaccacccttagatgttcttggtgaacttcccaagatttcgagtaaacaaggatgtcatcaatgaagatgataacaaactcttctaagaaatcccagaacaccccattcatcattttcatgaaggttgttggtgcattggtcaatctgaatggcatgaccacaaactcaaagcggtcgtaccttgtccggaaagccgttttccccacgtccgttagctctatgggaatttttgaaaaccattgtgcgcctccaagttgatccatcaactcatctatccggggtaagggatatttgtttttcattgtaactttattcaatccccgatagtcgatgcatagcctaaagctgccatctttctttttcacaaacagaaccggtgcaccccatggtgagctactcggcctgatgaatcctttatccaacaattcctccaactatttttttagctccgccatttccgccggtgccatccggtacggagctttagatatgggggttgttccgggttcaagttctatcgtgaacgggtctgaccggtctagtggtacaccactaacggccgcaaacacgtccgagaaatcgttgacgatcggaatgtctttcaactccgcactcgcccccacttccttggttgtgatcgtggctaaatatgcctcacatcgtttcccgagcatcctttcagcctggattgccgagattaccaagcttcctgaggttgttcttattccttggaattttaacataccctcgtccctctcgaattgtatccgtcctcggtgataatctatgtgagccttgtacttccccaaccagtccatccctaagataacatcatgtctctttagtggaacaatgattaggtccgcgtgcatattgacacctttcactacaagcgagatgccccgaacaagtctggtcggatacattgcgtgtccgccggccgctcgtacccttccataatcggtgtttggttctttcctgaatccacctgattcaaccaattaaggactaacaaaacaatgtgtagccccagaatcaaatagagtgtgcgtttctacgtcacctactctcaaggtccctacacattcccttagaatgctgagtacctcccctttctcatatgcatgatgcaatgcaaatgcagttataaaaataatgaatagggagttacgagaacgtaccagtgatcgccttgaagtttcctgcatcgttagcttcctccaacaactcataaactagcggtgccacagcttgccgctttgggggaggcggcagtccgtttcccccgcgattgtccctttgtccggcttgcttctctgcagtcagcttagtgtactcccgcttagatgtccagccttcccgcaataaaaacaagtccttgtctcttcaccgagaaccctggactgtcctagttccattctcgtgcagcttaggatcgcatggtccttgcttccacaccgaccacatgcacctacggccttccagcaagttccgttgtggctcttaccacaggtcacgcattccccggtcttagcatcggacttggtgttatccaccttgtcaaatttccttttcttatccgcgggtttggtgggttgattattccagatcggagctttctcccgattgaagtacctttcttcctcaatcccttcctcaatcatcgctgccctttcaaccaatttgaaaaccgaggtcaatgtccggaccaaacaatgattgtggatctctatccttagtccgcggataaatcggcacacttgagcttgttcctcctcaagttcacatcccacataacgcctaaggccgttaaactcctcatcatattcacgcaccgtgcggttcccttgaacttggttgaggtacgcacattcaagcctatcccaagcctccggtggaaagtacttcttgttaaactcgtcttcgaactccgcaaaggaccggacctcgtcccctctgcgtttcttgacggttaaccaccagttatgagcgtctccttcaaggaagtggaccgaaatgtccctttggtaatcctcagggcagcgagtagacttgaagttccttttgaatcctcagggcagcgagtagacttgaagttccttttgagtctactcctccactcatcggccataatcgggtccgtactgcccatgaagtgtctcgtgcccagccttgagacatgttcgagaaggcttagatagtctccccttttccgccatgattcggttgcgaattcacttccacaacttctaagtcatcgtccttttggttatccactccttggaccaccgaatccgctacaacggccttggttaatgtggctaattgcgccatcatccccttcatcaaatcccactgttcttgggcagttggagtactgttccggttatccgtgctgtcccttgcaccgctactcttcggtgcttcctcatttatggagttcttcccggcctcaggtccggccaagtctatcccatcgagcatcgtcccgactctggttttctcgttgatcatcgtttcctcctcaaccaaagtctccttgataatgcccttgtacttcttactctttcccgttttgctgttcttacccatctgcgaaaccaccaaagttaatccacataactcatagtaaaattgcaaaagagtaaagatcaactaccgcgagattctcaagccgacaagtggtgataccccttaacccaacacctagccttagaaccaagcatgatctgataccaacttgaaaggccccgatccggactgcctaagtccgggcgagatctctcgacgcaagccactaagtgactcggccctaaccgtttatgaggttcattcctagtataatccgtttcatatgattccgtgattcaatatatgagacgtatagagtaaacaaacaatcggatattttattaattaagcaaaggattcgatacaacttatgagtttgcatataagctattacaagtgatataatcgatccctagactatccgagctatcaccacccatcatctcgaccttgagtctctcgcgcctaagccaagtccttcccacgatcaccattcgttcctgaaagtcaataaccaataattaataattgcgtccttctaattccattcttatgccagttctaatctctgttttgcccttggtaggcgatagctgctaccaacaagctggttgctctctatgagcaacgtctgaacaaggtttcctcaaagagcgagttcgaagaagggaagaccctcatttaggagctgacagcaagtgtgaaggctggtcaagaacgcgaggtctcgttctaggtatgcttcgattatgatttgtttgtatatattttatcgatgatgtgatggttctgacttggctgtggtttcaggcggagatcgagaggtttaaaatggagttgtccacttcgaaggatcttgagaatggttatgcggagaagatcggggccatggaaattgagattgggggggggttggggggttggaggcagataagcacacaacaaggaaccagattcatcgcctgactgaaaagaaggacgagctctctaaaatagtgatggatcttacttcgatcgcacaaggagcaaagaaggcggttcacgatgctaaggttgacctagctgttgtgtactcgaagttgctagttgggatcaaggagaagtggatcgccaagaaggagttcaccgtgctggaaggtcaagcagccgaggtggagtcgaacttggctttgatcgactaaatcgctaaggctgctatcgatctgaccgtggagagaccttggtagcaagctgagctggatgacctggaggcgaggtgcgcatcaaaggaggtatcagacttcactctgagcaagctggatatcccgcaagtgttggagatgtcggtggtacgtccaatggacgttgatgagcaaggaacgccgattggcttggatgagtttgggagcaacaaggatgcatttccaggatgtctcgctgaggatcccggtactgtctttgccacgccggtcggggaaccgaaggagtgattacttatgctcctttctttaagtttttgtgttttcgtttcagacttagtgcctaggaaggctttcatcctgttgtttgttcctttttgaacttggtgcctgggaaggcttttgtcccttttaacaagtactttgtttgcttcttgttcgcgtgttgacactttatcgattttggtgtatgatcacctcgttttgttcatgttccggataataattagacttgttttgagtccaggctattttggatgtgatatggtatgttcttcgtatgtttaaacttaagtaagtttgagtggttttatctcgggaacctgttgaagtgaggtcacactaaggacctgccagattttgggagctgggcttgtggtatcgccagatcgcgaatgaaaccttcgtttcttccttgtttagtatgttacgttttgatggcgaaggaaggagttagatatggtagtcgtaagtgagctcggatgaagttgaagtgatgtgtttttataggtaaggttcactgtcgactttttggaagcgagatcacaaagtggatccgccaacattcgtgtgttgggctttcgatatcgtaagattacgaatgagttttaaatcgtagtagaaacaattgttttgtgaaacatgatattgagtatcaaaattttcttttattcttatctcgaaattgttaagtacaaatgaggtaaagcaaacgatgatctgatgtctggtcacctagaaaggacctgcttggtatcgagggatggttgaactgttaggtgagcagctaaccttctttgatggaagttgtgatgtttgttttccttgttgaagaaaaatgtttcaaacggaagagttaagacggtggctgcgttcgcggagggaactgcctacatacctggttaggggattaagccttatcgtagttcgattgaagtggtggctgcgcttttggggggctctgcctaggtaccttgccaagggatcaagccttatcgtagtttgattgtttttgagtacctattcgtggtatttcttgagatgcatgacattccaaggcctattcgtggtttttgagtacctattcgtggtatgtcatgtaccacctcgatgattcgatagggatcttcccagttggtttccaactttccggcgtttagatctatggtgttgctgaacacttttcgtagaacgagctctcccacttcgaatctccgaattttgatattgtggttatagttgcgggcggcagcttgttaatagttttgaactcggatcattgcctgatctctgcgttcatcgatgaagtccatgttttcctgtaacatttgcgtgtttaggtccgagttagcaggactggcggtccttctcacgcttggtactatggtttcaacagggattactgcttctaagccataggggagagagaacagtgtttcttgcgttgatttgcgaggtgtaattcggtaggcctagaggactgtgtggagtacgtcggaccacattgattttttggaatcaagtcttttcttgatgttgctaagtatagctttgttagcggcctctgcctgtgcgttaccttgtgggtaacggggggtggatgtggtaagacggattttccacttgtcgcagaatgctttgatttttccctaggtgaggttagtccttttatcggtgacgatctcatatggtatgccatgtcggcatacgatattttcccacaggaagtcctcaacttgtttctcgattagctgttggaaggttttagcctcaatccatttggtagagtagtcggtgaggaccaacaggtttttagtctcttcttcccaccagaggcttccatgggccctacgacgtccatggaccacttcatgaacgagtatgaagaagagatcgaggacatttcctcgggaggttgatgtagagtaggtgcgtgtcgttggcacttatcgcacctgagtgtgtgagctatgcaatcgtctagcattgttggccagaagtagccttgctttttgattctgagggcgagggtacgtccactgcagtggctaccacattgtcctttgtacatgcttttcatgaggtcttttgtttgttgcccgtaggtacacaccatgtagggacctgcgacgctgcgtttcatgagcctcccttccatgatgttgtaccttgcactctgggctttgagttttctggcctcccacttgtcgggaggtgtgatccctagttcgatgtaatcgatgattgggattctccggtcgttgtacggttgttcaggggtttcgagctccggctcctcctccgttgcatttgcctccacggctgctacgagagctctagctgtggtggtggtgcttcgggttactcgcgtgaagttgcaagttgtcgaaggtttccatcccagcatgtttgaccgttaggtcgatgctcgggtgttctattccttcgacctagataattcttttgacgaaaggatctgaggtagaagcgagagctgccaaggcgtctcccaactcgtcaccagccagttccaggttaattcaaacgattcgaactgttgggtcaaggttttgaccagttcgaggtacgcttctatgcgctcgtctttagcttcgtattccccgtggaactggctggtgacgagttgggagtcgttgtgggcgtgtattttgcggatccctatttcttgagctagcttaatgccaccaatgagggcttcgtactcagactcgttgtttgatgcgttgaatccaagtcggaacgattgttcgatgacttcctcggtgggggaggtgagttgtattcctactctagatccttgtcggttggatgagccgtcgacgtggaggagccatttcttattagagttggttccatccaggtcggctaacgggagctcgattacaaagtcggctaggacttgtgctttcaagctggttctggtgcgatattctatatcgtactcgcttaactctatgtcccattttgcaagtcgtcctgattgggtcagactatgcagaatggttcagattggttgggacgtcatcactacgatggggtgtgattggaaatatggtctcattttttgagctgacatgactacggccagtgccagtttttccattgctggataacgagtttcagcgtctatcaacgatttactaacgtaatagatcggtttttgtcgttcgtgatctttctcacctggacaccgcttatcacggttcaggagactgtcgtgtacaggtacaacagttctccttcttcgggttttgcgaatatgggtggttcagtcaggtatactttcaattgcttgaaggcttgttcgcagtcctcattccagtcgaactttttctcctttcggaggagctggtagaaagggatgcatttgtcggtagacctggatatgaactttttgagggcggcgatacggccagttagtcgttggacctcccgtgccgtttttggtgatggcatttcgatgaaggctgcaatttgcttaggattgtcctcgttgcctctttcgcttactaggtatctgacgaattctcctgatggaactccgaaagagcatttctcggggattagcttcatttcgaatctgttttggattttgaagcattctcttaattgtgggacgtggtctttttcgtgagctgatttgaccagcatgtcgtcgatgtagacctccatcggtttacctatctagtcagcgaacattctgttcaccaatcgttggtaggtagctccagcattttttaaaccaaagggcattactttataacagtaggtgcctcggtcggtaataaaagctgttttttcttggtcatctgggcgcataagtattttgttgtacccggagaatgcgtccatgaaggacaatagttcgtgtcctgcggtggcttcgacctgtcggtcgatatgcgggagtgagaaactgtctttaggacaagctttattcaggtccgaaaagtcgatgcatactctccacttcctatttttcttttttacggctactgggttggcgagccagtcagggtattttacttcccttatcgatccgatcttgagcaacaggtcgacctcatcgttcacagctttagccctttcaggacctagcttgcgacgtttctgcaatattttttgtggtacttacaatatttttttgtggtacttgcaatatttttcgaggtcaagttctggactctcgtcctcggctgccttttctattgcgaatagggtatgctgcccttgcgtttggttttccattttgaagggttttttggttgcaaggggagcgttttgtgttttagattctttgaatcttaaggccagcacaacgagttcctcttcggcttttgcgaagtggagagctttgtaaagcgcatcgtctaaagataccggttgcctaacagtgaggtcctcacggaatctagaggaaatccacaagccgttgcgaagggcggctatggctacctcctcgtttaggttcgcaatctttgatttgattgctttgaatttttcgacgtaagatcgcagggattcgttctgaagttgggtgagaccccagaggtcggcttcagacgtcctgtttacgatgagtaccgagtactattttaagaaagcggcggcaagctggtcgaaggtatcaatagactagcaaaccattcgagggtgtgacctacgaggttctctgcgaagaaacagcaatgacctgcttcgttttcttagtccttcaggtacgctcatgttatagccagacggaaggcactcagatgagcctttgggtcgctcgttccgtcgtatcctgggaaacggaatctctcgacgtctctgatgcgataatgggtaatcctattcgtgaatggggtacgcctggtttcttcgatcactcgatctatgtcgggaggatcgctcactgctagatgcactcgtgaatgcatttgagccatgttcgcatttgtttgagctgcgtaattgcggaatgtttccatatccaagacgttacgcgaatcgattggtgctcggggatcggttggaccgttaaagaggtcacttcctggtatccagggaacggatggtagattagcaatggaggttcgttgttgcgttaagttcccgggaacgcaggagctggacgcggttgtttggtttctcgtccacgtgtaccttaggggcgagtagcctagcggtagccttgggaaggtaggcattgtacgtgtctcattccctgttgttgggtattcgacgagagtgttcacgggtgcctgtaaaaatgtgacctgctggttgataggaggtgagacctctatcgaggcgaagtctagacgagtccttggagtgggatctgttggggagacggtacctgtcagatttatggtgatatgggcaggaatcccagttttgcggggggggggggggggatttccttacccgcggtatctcgcgctctacctcctgtgtcatgcgagtggagtcgcgtctctgctaacccaccattgcggcgaggttgcgatgcgcaatttctttgtttttgcttagttgatcaggttcaggatcattgcgcggagctcggccagttcgttgccaggtcttggagggacctgattagacgggttggccgggttatctcctttaggaggctgtatcgtgacgttttcctttccgtcccttgtttgcgaggggggggaggatttggtcagatccagaagaatttgagttttgggagatgttctccgcatcaatgtcatggatagcatcaacctggattccgagagggatatccgttaggaggtgcccgtccgtgatgttatcgtttgggatccgaactggtaagccagatctcgttgaatcggattaattggaatccatgatcgttggtcacaattgatgtgttagtttcggtgttggaatgatctatttccgtccccatagacgacgccaaatgtaggttctgaaatccacactagagatttgtaattgagattatgagaaaggagggctagatcttcacaggaactttgagagttatattgctaagaacgattggacttttgtattgattatgacagagcttttacaatgtgaaaggagattacaagtgtaaaagtataagtgtaaatgtaaagatgtattgaattgtcccttcaaagtcgtccttgctcccttatataggtctacgcacgtcgtagctccgtccgggatctacagagattcctctggatattcggcaggtcagtttcgggatatcaggtccgctttgcgaattcctcccagttagttcttaggttgttattcgcttatcttccttcatcaggtgaccggtattatcaggcccaaatacccattcgcgtatgtggtctcatcagttgcgtcggtcctctacttggggggcttggtggcttagtgggctaacttggtattttcgcaggtggattcctggaggggaatccagctccaacagttttcttcttcgtaatcctgatgctaacccaaggaagagctgcaatgccatcttgatcagagaaggagatgatatgtgggaggaattggacactgaagacgagttggagctcgcagttgtagagatggtgtcgaccgacaccctcctctgtcgatcgacaccatacgggacgctcttctcaaagacgacccaatacgacggtgtcgatcgatacctctctagtgtcgatcgacactggatccggacagcaccctgtgaggtgcaaatacctatgcagcccgagtctgtctacactcctcatgtgccttatccgaggaggcgtcgttctaagcaggagcttcatgctgccaagtgcacagccgtaatggagaagatcctccatactcttcctaaggatgcttctgagacatcttctatctcactcaacaggtatgtcaagcgacttgttgacaatggaattagctcagatgaagctaagctgattcccagagacatcagtgcaatcatgctgcctaaggccaagaaggagaaagcacagagagtagacatagttgagtacatccgcaccattaatcttggtcaaaccactgagaagcttccagatccaggtagctttgttcttgattgctctatctccacaagcaggttcagccgctctttgtgtgatatgggatcaagcatcaacctcatgcctaagtctgttgctcagagactacgcatgactcactacaggtctactcacatcacacttctcttcgcggatcgttctaagcgaatccctgaaggaatccttgaagatgttcctgttaaggtgggtaactctgttatccctgctgattttgtggtcctggactatgaaaagaaacccaaggatccccttatccttggaagagcattcctagctatagctggtgctaggtttgatgtgaagagagggagaatctctctcaaggtttgtgatttagagatggagtttggcatggatgggtcagagcttactaagcctatcagttgtattgcttccagcacagacacacctcctcaaactgatcagaatcccaccacagagccacacacaacgctcccattcgctcagctcgccaatgagatttgcagagcaacggtgtcgatcaacaccactacccctgtcgatcgacaccctcgggtttcacagatagaggattctgcacattctctccagctcacaccacttgaggacctatgtgataagttctcttctctctcttttcctgttttatctttgattaattctttagattatttgaacactgctttacatgataacaagcctagagttcctcgaaagcttgttcctcttattgttcttgcttgtgacgagacgagtgttgatcgacacactcctgagtgtcgatcgacaccagaagctgctccaactaaatccatttacacaccgccttggaaggcgaggaggcaacaacaatcctctaccagtccacccacatcttaaaccccaccaagtcaagttattgactcaaaacaagcgcttagtgggaggcaacctactggtttgatttttcttttccctttcttttcttttcttctatttttgatttatttcccccgctttctctggatttgaatgccactggggacaatgtcgtttaagtgtgggggaggttcatactaatattgcttttatttttgtttcttatcatttttcgttttgcagttcatttggttattttttttatttctttcctaaaaaaaaaaagaatgtttttttacttaagttaggaatcatgatctatatttctcttgtttattgcctgattgatgagtgctgcaggctcgagtcaatccgactattggaaaatctagatggcaaaccaacatacttgaggatatcctagtttccaactcaaccacatggctggagctaatctcacagctcttccttttacctcttcaaacggatagtattcatagatcttgactccttgttcatacctgataatgagaccaatgtgataaaaagaatatgttcctctccccttataaaaagaaaaaagtatatatatataatgagagattgagacgactttcagatagtgtataggagtaggaatgtttcctatgaccccattattatacattatttggaatgaccaattacaaaggttggaaaaatgttgagggtgtcgatccagtatgcgagttctcctttgtttactctctaaaaagaataagtctgggggagagaaagaacaccaaagaaaaacataataaaagaatgatcgatttatcatggtatagtacaggaatgagtctagaaggatcttgaatgttggcttgtttgatgaaacccagcgatgaaagcctggtagatatagttgtggaacttaggtatggaatctagaatgttgtgtaagcttgcagagaagtacatgttggttaggatttgattagacctgttaggcatatggacttagtttgaatgatcatggcaataggctagagaatgttgggagttcctttgttttcaaaacctcttccacgggttcggcttttgtgttttgcttgaaggcaagcaaaagctaagtctgggggagttgatataacccgattttcactgattttatctatgttttaggtataagattttgagtctttatgttatttctcgagtctttttagtgtcttttcaggtattctatgcaatgggacaacaatggagataaggagacattttggagcaaaagccaaggaaaaggaggttaaggacgattttggttcaggaatcagcgaggagtgtagatcgacacactcttggtgtcgatcgatgccagtttcggcccagcaaaaaccctagacgctttcaagtttacagaagatcaaatttggtccagaagacttctctatttgcattattagtccctgaacgtttttagggtctatatatattgtttttagacctaagtttcttttatcaagtcttttatcaagttttctacaaaccctattactaagagacataagctattcatcgattattttcagagtttcattcagatctatatacagtgaagagatcccttctttccctttctctatttactgtgtttatgctttcaccctcaaatatgttgtttgcttcatccaatatgtcgagtagtctgcttgttaggaataaggtttctcattagggattcatatggtttagtagattgccccatttgctaggttatctatagaattcttcatctttaattatgcctaatgctagatctagagtaattaactagattttgaatccagacaatagatattcccgccataggtatctataattggatctattatttgatgagtctggtttataagtgtgtaataagaatcggcctatttactaagatgaacaattgaactcgttaaaaatgcatatttaggttgatagtttctcggcttctccgataacatcctagctttcattagatctactaacaaatagtttcctgagaataccctgttcctacctctttattaaattgtttacaacacaatcaatatgatgtctttttactttgttctcttttattttcacttatacactgctagcttaatctcaacatttaactcactgtttgaacaaaagaacttcgtgaattcgatcctaaaatactgcaattgatctcttatttgagagagtagttctaggtaatttgaaccatatcaaatttgacagccagaatcaaagaagtccaaagaatggtggtattgagtcatgagtgcagtgcaatcacttagaaaaagattgttcaagaaaagttggaagatccgggatctttcactctatcatgctctcgtacgcaactagctttgagcaactttatatatgatctaggagcttcagtcagcataatgccactttctgttgcaatgaagctgggatttgtccaatataagccatgagacctatccttgatccttgctgataggaccttaagaaaaccttatggcctcctcgaagatctgcctatcaagattaatggagtagaagtgcctacagactttgttgtgctcgagatggatgaagaacctaaagatcccttgatcttaagaagacccttcttggcttcagctgaggcaatcatagatgttaagaaaggaaagattcagcttaactgatatgactcaaattgccttaaagcctctctattaagggtcggattccacaaagtccttttgttcacacagtgagctaagtgtcaagattaagttagaagagaatgagaaaaataaaaagaaaacaaagtaaggaaatagcagattggttggttgtgaaacaagataataaaatgtcaggtttagggtattctcaggaaacaaattattagtagatctagtgatagctaggttgttatcgaatcattcttaaactcaacatctaatatcagaataatcggtggcgttccgtgaaactcactatgcttagatctaaaattcctggtggggttccgtgaaactctattcctaaacatgcatgctaaacgagttcgataagttcaccttagtagatatgatgattcttattacacacctataaattaggcttatcaaataatagttctgataacagatacatatgacgggtatatatattatctaagatcaagttctagttaattactctagaactagcattaagatcaactaaagatgaagaatcctatagataacctagcaaagcggtaatctactaaatcatttgattctctagtgagaaaccctaaccctaacaagcagactactcagacatggagattgaaacaaacaacatgattgactaagaaagcataaacaattcaatagagaaagagttagaaaagatctcttcactgttattgaaaatctaatgaaactctgaaaacaaggggtgaataccttgatgtctcgaaaacttgatagaaaattccttatgtctaaacaatgatctttaaaactatatatttgaactacaaaacgtgcatggactaataatgaaaatatggaacttaaaagcgttacgtcttctggggcaaatttctaattcttcaaacttaaaagcgtgatggacttctctgggccacaactggtgtcgatcgactctctcgactggatctaaaagtgaattcgtcctttagcttcttttcctcaggttttgctccaaaatgtctcctcatctcatttgttttctctctccatagaatacctgaaaagactctaaaaagactgtagaaataacaaaaagattcaaaaacctatattttaaagcatagttaaaaacagtgatatagctcaaattgccttaagcttactccctcaaataagagatcgtcgttagcacttaagggtcaaattccactgagctctcgatgttcacacaatagacttattaaagaaaacaattggatgtaaaagacaaataagcaagtaaacgaggtgtagattcaagtgattaaagcgtcgggtctaaggaattgtctcgggagatagataaattgtagatctagctaatattaggattgttattgcaccgttctcaaactcaaactataattttagagtgaccggtggtgtaccgcgaaactctctatacttagagctaagataatcgtagaagccgagaaatcctatactaaagcatgcattgttatcaagcttgattagttcacctagtatctaaaccagagcccttctataagcctacctgttctttcttaaatacctaggctcatcaatgatagttcaaacaaaaagtacctatggtgggcatacctattatctaatatcaagttctaggtgatcaatctaaaactaggaataagaataatcaagatgaagaaccctaagaataatcctaaggggtttagttagtgttttcacatggatcctccagttagactgttaaatcacaaaaacacacatcaatagttccaacaaagcataagaaaataggagaaacaagttccaaaacagataacaaatagtctgaaataaagcaaaaacaaagtttgaaaagaaagcaagatagtgaggatggctagtcctcatgctctgagccggaggtgggtgcgggagagtaacgacggcgacgggtgggagcaacataaccacaacgagagagtgtagctacggcattccagacgttcttgaagctgtcgacgacgtactgctgaaagacctgtggctccatcgggctgggaggaggagaatgcagctgataagggagagcggaagaggaagatccaactctcggacccccagcagggtcaatgaactcgtcctcagtctatgtatgcacagatcctgaagttgaacctctctatcgcctggtgcgtggtgcaacatgcaaaaggaaggatcgggacaaaaaccgagctcctcatgctcgccattaatctctgtaagcgcggtgcaaggtaactgaatcatatggtgccatgtcttgtctctgaaacaccaaaggaagttgcctttcatccagtgagagtttttaagataactctcatccatagtgaatctcgtggtgttgacctcttctccctcaaagttgatgcgaaaatgctcaaatataggagtagaagactgccaactctctcagatttcttccctctaactataaaggacttggtcttgagtgagaccaagtgatgagcaaatacagtgccaaagttgacatcacggtcaacctcctcaaatccaaagctgtctggaaagaaatcatgaacagcatgatagaacaacaacaactcagaaagtctcatcttgccaggttccatcttgcacaacagtgtgctactaatcagcctaaccaaatatctcagaacatggtgacgaatctctgagtgtactgcgtccttggaatcgtaaattccattgccaaacctgctccagaaaatctgagcatccttaaactgtccaagtagagcaactctagtgagatcattgtctaaaccatataggtcacataactctctcaatggtagactgtatctgacaccgcgaatgaagaagataagagctccttcctaagcattgtgtttcctctcattcacatagtagaccctaacagaagccatgaattgtctaactagctcaggatacagatcgtactacctacaatagatggctcccaaaccaatatcatctagcaaacctaaaacagatttctctatctgcaaacgctgcatcaaaccaaaatccgcaacatgagtaggcaaaatttttacactcatccaagcattatagaacagagtatcaaaatcatcccaatctggagaaaaagggcgattgatatagtcacctttagtgaattctgtgttgacatccttctcccaaactctttgagaaggaattttttctgttggaagctttggccatggaaatcgatagacgggaggttcaggcgctgcagctggtggttgaggttgggaagggcggaggccggcggcggtggagaagctcctgcggtgttgagcaccggcggaggaggaaggtggaggaccgctcttccttgccttctttttctgcccagccatcttgcagattggtggaattgatacttggggaagatagaggatgaaattctaatgagattagagcctgaaatcacaagaaacggtgaaaaatcgaaggatctagaaagaaaagagtgattttggcggtttggaaaaaactgaaatgaagaagatgaagttttaggttaaatcgacttacctggaaaatgaggatgtcgatcgacaccagagcttttttttttcttttttttttctttcataaatcctataaaaccaaaaatcctaagttaaaaattaaatgaatgaaatgatgaagaagagaaatacttattagtgggttgcttcccactaagcgcttgtttatagtcaatagcttgactttgcagttgcttaatcaacatgtgggtccttaagatccaaaggcttttctactggaatctcggcttcagcccagtagtgtttgactttctgtccattcattgcaaatgatcatccattgtatctgtaagaacgactgttccatatggcctaaccaaatggactatgtatagacctgaccaacgagaagacaatttttcaggaaacaatgtcaatctagaatcataaagaagtacctagtcattagactcaaagtttcgagtgaggatcttcttgtcgtggtaagcctttgtgcgtttcttgtagagctttgagttgccataggcgtgaattcgtatctcatcgagctcattcaactgaataagtctcctttctccagctgatttgatgtcaaaattcatcatcttgactgtccaagctgctttgtgctctaattccactggaagatgacaagctttaccatatagaagatgataaggtgtggtcccaagcggagttttgaaagttgtcctataagcccacagtacatcatctaacttgtaagaccactcctttttcgctttacccactgttttctcaacaatctctttgatctgtctgttggaaacttcaacttgaccgcttgtttgtggatggtagggagtagccactggatgctgaactccatactgaagaagcaatttcgcaagaatcttgttaatgaaatgcttacctccgtcactaatgactatgcgtggcactccaaatcgagggaagatgatagacttgaagagtttcatgacaattgctgaatcgttcttcggactagctatagcctctacccacttagagacataatctacagctactaggatgtagagattcttgttgaaaggtttgaagggtcccatgaaatctttaccccaacagtcgaagacttcaacttcgaggataaatttctgaagcatctcattacgcttgctaatctttccccttctttgacaaggatcacattgagatatgaacttctgagcatcccgaaacattgtaggccatcaaaagcctgcttgaagaactttggatactatcttgaaggttgcaaaatgaccaccatagctagagctgtgacaatgcgatagtatatcaggaacctctgttgcagtaacgcatctcctataaactccatcagaacaatgcttatagagataaggttcatcccaataatatcgcctaatctctcttaggaatctcttcttgttgtaatctgtgaaattatccggttccacatttgcagctaggtaattaacaatgtcagcataccatgggtagtccttctcgacccctgtggtggcgcaattctcagttggtgaccaatttcttgtcgattcaggagggtgtcgatcgacattttcagtggtgtcgatcgacaccattgcgcaactacgaatattaacttcctctgaattgtgagtgttgatcgacatagaaggagtgtcgatcgacactaaagttcgattctgcaacttatcacatttgcagtcatcttctccagctgtatcaatcatgtatatgttctcctcaggcaagaaatcgttaatagggacatcatcatcgatcctaatgcgtgacaaatgatctgctacaccattctcaacccctttcttatctcttacctcgatgtcaaattcctgaagatgcaaaatccatctcaaatgtcttggcttagcatccttcttttgcatcaaatacttcaaggcagcatgatctgtgaaaccttggatccaacaagataagatctcaatttctagaaagcaaacaccacaactaacaactccttttctgtagttgcataattcctttgagcatcatcaagtgtcctacttgcatagtagatggcattaagtttcttatccttcctcagtcctagaacagctccaacaacaaaatcactcgcatcacacattacctcaaaaggtagatcccaatctggtggttgaacaattggtgcgctgatcaaggattgtattatctgctaaaaggcatcatgacactcttgtgtaaactcaaatttgacttctttacagagtagagcagagagtggtcttgctattttgttgaagtctttaatgaatctcctatagaaaccagcatgtccaaggaaactcctcactcctttaacattatcaagtgcttgaagacttgtcataacttcgatcttagctctatcaacatctctaccatgctcagaaatcctgtatccgagaactatcccatcctgcaccataaagtgacatttctcccaattcaaaaccagatgtttctcctcacatcttgctaacactttgtagaggttctctaagcaatcctcaaattatgatccataaactgaaaaatcatccatgaagacctccatgatatcctcaatcatgtctgtgaagatagaagacagaagggcattctcagataagcaaatgtaccataggggtaggtgaaagttgttttctcctggtcgtctggatgaatcgggatctaaaagaatcctgagtatccatcaagaaagcaatagtacttatgatttgctaacttttccaaaatctgatcgataaatggtaaggggaaatggtctttcctggtagcaacattcagctttctgtaatcgatgcacaaccgatggcctgtgattgtccgagtaggaatcaactcatctttctcgttcttgactactgtaactcctcttttcttaggaactacatgaacttgactaacccaactgctatctgaaattggatagatgatccctgcttccaacagcttcataatctctttcttaaccacttctttcagattcggattcagtcttctctgatgttcaacggaagacttagactcatcctcaaggtggatcctatgaatgcatacatccggagatatacctgcaatatcattaagagaatagccaagagctttgtgatgattgcgcagcttgcttagcaataaggtgagctctacgggattaaaagaagcattcacaataacaggataagcaaaattttcaccaagaaaagcgtaccttagccctgctggaagtggttttaaattgattttaggagcctttgctggatcccaatctgaattagtagtcggtgttggagtcacaagtggaagagattcttcaaccgtaagttgcatcacatgttcggtctcatctagcagcttagtatatgtagaagtttcactgtccaaatctgcactgtcttctatggaagagtacaaaactcgctctaatgggtcttctaattccatttttgaaataccatctgaacctgatgaagtgaaagaatctatcaagaaagttttctcttctatgaccagtttcttgaccaaagtgttcatatagaactacatagtaagattgcaaacattcagccttatcctcccttgtcgaacatctaggattgctccagctgtatgcaagaaggatctcccaaggattaatggatccttctcgtaaggcaagactacaaagtctataggaatcatgctatttccaatcattacgagaacatcgataagaattccatctggaattcgggtagaacgatctgccaacacaagagtgataaaggtaggctcaagattggaatacccaagatgcatagctattgaacgaggcatcaggttcacagtagaaacgagatcgcataaagctcttaggaaggaatcgtggttgatggtgacactcagtacaaaggttcctggatctggtagctttcttggaattcgttcctgaatgatatcgctgccttcctctgaaatcatcataataatgcattctttcgtcaaatccttagtgaccattgtcttaacataccttcttattgtgggagaaagatgaatagcttcaactagaggcatctcaacaatcagcttatcaatcatagccttgcatctgacatcatctaaggcttgccttgactttttaggactcttggggaaaggaattcgccgatttgctgacttggtttcagttggaatttgcacattatctgaacgatctgggtgtcgatcgataggggttgggtgacgatcgacaccatcaggaataatttcctcctcctccgcgaagttgtagattccactcgacaaaggcaaaacaaagtcgtcaagaataattggtgtcgatcgacaccctggtgtatcgatcgacattgagtctttttctgcaattggaaaagatgaagtctgagctgaacattcgcgctgaagtattgggttgagcagctttccgctgcgtagtgtgagtgcattgatagaggctgatgtaggtgaaagctcggatatatgagagcgtagattgtcaatcttgctatttagatctgtgtagagagaatcatatttgctatcaaacttatcctcgagagcttcgtttggcccgtaagaatctgcgcaagcatggagtcgagtctgctatctaatgagggtggagggggggggggcttggataggatcgatagaggctgatgtaggtgaaagctcggatatatgagagcgtagaatgattgaaaacagaaaaatactaaaattcaatagcaagtgaatgaagcaggtaagtaaacagaaaaatcaaatggatgagaaattcctaaggatggggtaatcgaatagtgtggtctccctaatcaattcagttggttaacaaatctcaattaagctatccctagacaacaggtgcaacaacagattaattcactcccgtgatagaaaccctcaagcatagctagacactgacctaattcccattagcgatctctaactaagcaggcaataagaaccgactgttaaagccaataactgctctaaacggtcaatcccttgggatagagacgattatcactagaattaatagatccaacgttctattaaacgccttctgggcgctggaacgtctgggatcggattccagttgatcagaaaggaataagcagtaaacacaactaatccagaagggattcaataaatctacacttaaccaatagattcgactaggggttccgcaactactctatcccgtcctcagaaatcctaatcactactcaaacaacatgcttaaagacaataacatagaaacgattgaagattgcatactaaaaatatgaaccaaagatgaacaagcaaatgaaagcaaaatctgaataacttagaagaaaaaatatcgaaatacaaagttgcaggaatgaaaagcgtctgctgaataatagtgcaaaattcgtgtctctaaagtgcatgtctgggggcgaaacccttagagacttatttctactaagataagaaagcgggcttcgagcccacttaacggcccatggacggcgtgatcaagagtgtcggctcaaagtgggcttctttatgggcttcgaatgggcttcgaatgggccttctcttctcttctctttctgatgctcaggttgtctggttgagttcggattgatcagaggatcggggtggtggtcgagtaggttggttgacagaatggtctaggctgcttcttggcctctgtgatcgagtaagtgtgtcagttgtcaggatggactggttcttctcctctccgatcgagtataactggtggactggcaaagtggactgcctggtcgcctatacgatagagtagaattgtagaatggattgcctcctctcctctgcgatcgagtatatctggcagaatggactgcctggtctactctgcgatcgattagaagtgtctggatggactgctgagctgactgcttccctctctgctactggtgatcgagtatgttggtggaagtgtgactttctgttctgttttccttctttctgagcaccaatagctccaaaacacctgaaacaactctagaatgcagaatgtatgcaagactagtcctagactcgaccaaagatgcaaaatgtacaaaaatgatggtgaatgctatgaaagatggatgaaactagactcaaaagaaatggtggttcaagtttagtaacaggggaccctcaaaagaaatggactgagctttaggagaatgctaaaggtaagagccaacctatgcatacaagaatagtatcccatctacccaaaaacatagacagtgtatacaccaacagatggtactaccctcaagcccagaatatgatcctagttctaccctttgcactcaaggcattttttttattttttcattcttatcttagatcaaaccactctttcttttctttgtctcttattctaaggagaagtttcttttactttgatggatctagtggactttggttttctttgacaactatggctcttgttatcttcttgtgatcaagacttttctatacttttttcttcagttgttatagagcctatattttttttagttccccaaaatccattactagactaacttgtttctcaacttccttttcctaagaacatcaacatttcctttctctcttatttttctaatatactcgacccccacttaaaaaaaaatagacacccacctagtcctatctagcccagaaaacgtggactagaactacatgagacactactcttgtcggctcaaacctaacactttcttccaagctcaatcctgaaacaggcctcacaatcacacacgatatataacagggctcaaaagaaaggtttggttaagggcaagggaaactacttcaatgatggaagcagctacttgggttagcaagggtggtgaaaagtttaaagaaaacccaagtatgtatatggtatccatgagttcaaattcgatgctaagacatgataattgcaagtcagattcaggttcaaattgatagggaatggtatcagataataacagtgtgatcgagtagagcattcaagacatggtgcagttttacttcaattttattgactacgcatcagacaactaccaactatgaaccaaaatgcttacaaggctatctcatcataatccccaatgcatatgcgacaatcctatatgaaacatcctagactcaatcctaaatgtgatgcaactatatgaacactctgtttttgtggaatacattttcagaaatttttcaatttttttgtttttttctatgccttagatgaagttaagactcaaatgatgcaaataagactcactagcaaacatgttaaatacttcttgaatcctcccccaaacttaaactacatagtcccttgtgtagtagaagtctaaagaagagttcaagagacactaaaacaaaacaaaaacagaaaatggtatatacaatgatggttgtgtgtggtacctcagttgaagacactgaagacgtagtcgtccatctcctctctggtgtaatcccatggaatactgggaccttgttgttgttcctgctcctctggtgcgggatactcgatcgtagtgttccgggttcaatcaaaattttataatttttggactccactggactgatatactcgatcaccacccttgagatagagtagaaattttgaatttttactctatctccaagtcgttcctctgttcctgagaaccacaaatataaccaaagcaaatcaaaagtaacaagaatagaaaaattatttacaaggataatcatgggacttcctcccaagtgagcttgtttaaagtctctagcttgactcctcacacttattgggcttttacaggctcctccaaaggaacaaaagttccttctggaataaattgatctgccatgtacttcttgagcctctgcccattgactgtgaagtctccattcttcccaactagaatgatagcaccataagatcggactacagtaacagagaaaggaccagaccatctcgatttgagcttgcctggaaaaagcctcaggcgagagttgaacagcagcacttgatcaccaaccttaaaatctcttgaaattatctttttgtcatgaaaagatttggttcgctccttgtagattttggaactctcataagcttctaagcgaatctcgtttagatcgttcagtttgatcaaccgcttctcctctgtagttttaatgtcaaagttcaggagtttaactgcccacatggctttatactcaagctcaacaggcaggtgacacgattttccatagagaaggttgaaaggagtcgtgccaataggggtcttgaaagtatgtacttgtttccataagaagatggaaatggacccatgaaatcaattccccaaacgtcaaaaatatcaacttccaagatcggattttgaggcatctcattccttctgctgatgttcccctttctctgacataaatcacattttgagataaattcctgagcatccttaaacattgtcggccaccataaacctgcttacaggatttttgacactgttttgaaagttgcaaagtggccaccataggcagatccatggcaatgcagtaggatgccttcagtttcgtcttctgagacgcatcgcctatagatcttatctttaagagtgtgcagagatagggtttgtcccagtaaaaatggttaatgtccttgaagaacttcttcttcacatagcccgacagactcggagggtcctcaccaccaaccaagtaattgacgtgatcagcataccacggaagcttgttctctactgcacaaacttgatcgagtgattttttagtttgagtcctcttgttaagttgctgaatcgctattagctgttcttctagcatggagtcgtcaatgggtacctcgtcttcaattctcatcctagaaagatggttagctacaccattttcaatccccttcttatcaacaatctccatgtcaaactcttggagcaataagatccatctcaacagcctgggtttggtatccttcttcgcatatatatgcctcaaagcaacatgatcagtgtatactgtcaccttagaacccaccaagtagcttctaaatttctcgaatgcgaataccacaaacagtaattccttctcagtggtggcatacctcacttgtgtatcatccatagtcctgctggcataatagatgacatgtagcttcttatcaatcttctgcccaagtattgctcctacagcgtagtctgaagcatcacacatgatttcaaatggatagtcccaattaggagcttggactattggagcagagaccaaagcttccttgattgtcttaaaagctgttagacattcttcatcaaatatgaattttgcctctttgcacagtagtctagtgagtggcctagccagcttggagaagtctttgatgaatcttctataaaagcctgatgcccaagaaaactcttgatgtccttcacagtctttggtggctgtaattgcatcataacatcgaccttagccttatcaacttctatccctttctctgagattctgtgccccaagacaattccttctctcaccatgaagtggcatttctcccagttcagtaccagattggtttcctcacacctcttgagtaccctgcacaaatttaacaaacaggaggagaaggaggaccatacacggaaaaatcatccatgaatacctcgaccgtctcctctatcaaatcggagaaaatagaagtcatacaccgctgaaaagtagcaggtgcgttgcaaagcccaaaaggcattcgcttgtaagcaaaggtcccataaggacaagtgaaggtagttttctcttgatcgtttgggtggataggaatttgaaagaatccactgtatccatctagaaaacagtagtagggatggtttgctaatctttctagcatttgatcaatgaaggataatgagaaatgatcttttctagaggctgcattaagcttcctagagtcgatacacatcctatgtcctgttatggtcctagtgggtatcagttcatcttcagaattttttatgactgtcatacctccctttttgggaacagaatggactggagatactcaagtgctatcagatatagggtagattatacccgcgtctaatagtttaagtatctctttctttaccacttctttcaggtttgggtttaatcttctttgaggttcaatactagaataagattcgttttctaaatgaattctatgggtgcatagggtgggtgagatccccttgatatcatctagtgaatatcctatagctctcctatatttttttaattcagttaataacagattaacttgatcggtgtttagctcatcactaatgataacagggtaagtagagttttgtccaaggaaaaagtaccttaacctttttggctgcggtttcagatccacctttggtgccttgagttcggaccagtcgtcggatgtcagatcggcgtcagagggaaggttgtgatcgagtagctcggtcgagtggacagtctgttgaatgacgtgatcgagtatattctgctcctttgcatttccgaacaaatcgtcatactcctctggattctcaacttctttatgcatatctaacaacttccggtaccccaaagtttccaagtgtaaatcttcttctttcccatcctttgttagagcattctatagatggtcttcttctgctagctcttctgcagttcatcagccaacatatccgtctcttcaatccagaagacctttccttctattgtaggcttcttcatggtgttagtgatgtcgaaggtcatcttgagttctttgccaatgttaagattgatctttcctttcttgacatcaatgatggctccagctgtagctaagaagggtcttcctaggatcaaagggtccctgggttcttcatccatttctagcaccacaaagtctgtaggaacctccacagtgcctatccttactggtaagtcttctagcaaaccatgaggtattctgatggatctatctgctagaatcaaagaaatgttgcaggccttgtatttactgaaaccaagtctcttggccaccgagagaggcatcaagcttacggatgctcccatgcttcacagaaggtttcagtattttgctgtgtgaatcctgatatctcattccggagtctggcagttctggagttggagaaaaatttagccaggaaggctttcttgcagtcgtcccaagttgtgactgatccctggggtagcttcttctcccacagatgggctttgtctccaagtgaaaacgggaacaggcgaagcttgaaaccatcttcactaactccattaatttttgtaaggctgcagagcctttcaaactcgtccaggtgatcgagtgggtcttccattggcaggccgtgaaatttgttcccctgaaccatagcaatgagaccgctcttgatctcgaaattattgttctgaaccggcagagggacaatgccgtgacgcaggttatggttgtgtgggaagtcgccagcgccaatgttgttgggcaattcttgctcatctacaacgtcagccatcgtgtgtgtatgtgtctgttctcttagagagcaagcgatgcggtcgatgttgtcgttgaagaggaggttctgatgtccttgtgaccgtgatgaagttacagtagcttgctgcatcgagttgactcatgtatggcttggctattcctttgtagaatagattgatgagttggctctcttggaagcaatgttggggaaattcacgctgataagacctgaagcggagcctgagtgaacgaagagatttgcaaacgaaatgcctctgtcacggattcatcgaagaagtgattcatgaatgcattctttgtatcagtccatttggttagtgaacctggttctagttgacgcaaccatgatgttcctttgcttgcgagagagtgggggaagagtttgcaaagaaggtaatcagctggtacaccttccgctttgatagaggacactatgccttcgaagacttccaaatgatctaatggtgattcatcgggagctcctctaaactcttgatacaagatcataataggcagggtgtatagcaaagtcttctctttcaaatggaggtagcttgaatgatgatcggttggtgtagaagagatcagttctgttgaagtcgcctattgtagccgtctggttctgcagagggtgtcgatcgacaccaggatggtgtcggtatacactatcgtgaaaatctgccattgaaacgtgattctcaatctgaaggtacctgaaacacaagagaccagaagacaaagaaacacgtaagtaggtgatagaaaagaagtatctagacctaaaatgacacctagtctaatggtgaactaaaagagaacttcggcaacagcaccaaatttgatatagctcaaattgccttaagcttactccctcaaataagagatcgtcgttagcacttaagggtcgaattccactgagctctcgatgttcacacaatagacttatgatgttatttaataagctagacaaagcaattggatgtaaaagacaaataagcaagtaaacgaggtgtaaattcaagtgattaaagcgtcgggtttaaggaattgtcgcgggagatagataaattgtaaatctagctaatattaggattgttatcgcaccattctcaaactcaaactataattttagagtgaccggtggtgttccgcgaaactctttatacttagagctaagataaccggagaagccgagaaatcctatactaaagcattcattgttatcaagcttgattagttcacctagtatctaaaccagagcccttctatgagcctacctgttctttcttaaatgcctaggctcatctatgatagttcaaacaacaagtacctatggtaggcatacctattatctaatatcaagttttaggtgatcaatctaaaactagcaataaaaataatcaagatgaagaactctaagaataatcctaagcggttttcgatctactaatccatctaaatccctattgagactccttaaacccaacaaggtgattacttagacatgataacggtaacacaaatcataatctgaatagtttgcattgatgaattaggatagaagtgaaaggagttcagaatgctctctaatgggattggattcttctctcaaaatgtgtatcaatctctgaaacaaaacttaggtctaacaaatgaccaaacaattaggtatattcgtgtctaaaaacgtgcatggactactttgcaactaaggcaaactccagggcttctcaaagacttggcagaaggcagaaaatcccatagccgaaataagggtgtcgatcgacataggttgggtgttgatcgacaccatcttttgaaaaaacgtctttgataatctttattgctgaaaagcttccaaaattccttattatactccatagctccaagatgtgtaagagtgccttaaatgactcaaaacatacgaaaagattagaaagagtctaaaaacaactctgaaactatgtttgaaatcagtaaaaactaggacatatcaaaaagtaaaagtagggatatatcattaatatcaccttcaaactgctttgactaaaagtagtgaagctggatttctctccatcaaaccttgagctgtgagaagtcattagactcacacaacgaagtacaaggatcaaagatctttaaaagtttcattgcgtcagaaacagaggatgttgcattgaacgaggaaggctcaattgatactcgaccacagtgctcaaccaaacagctaaagtcaagcatgagggcatctaatgattggttaaaacttaaggagaggtctaaatggcaaggaaaagccatataagagctaattgacaattagagagagctaaagtttaaatcaaagatttcaagggaaaattaaccaaactcctctcaacatcaaagaagttcaaaacgataaagccattgctctggttagcaaagaaagatgtgaattcacattggaatggtctagagaagaaaaccatccagatgatcaaaaagaagattacttccaagaaaggtccattgagtacaaattagagtcctgccaagagggcatgatgaatttgatgttgtatctactaaggaaggagaggagacgttaattctaatctatcaccctccttaagtctaataagtgtgaggagtcaagttagagacataaaacaaactcacttgggaggaagtcccatgactatccctatatatggtttttattttcttgttacttttgttttgttttggttgtcttattggttctcaggaaatgaatagcaattggagtaatcaacagagatgcgagcaagtggttggtataaagttttccaaaattttcaaaaacactctttcgcaacgtcgctagaaaagctcgagagtgcgatctaatggttttgggataatatctttctcaacaacaatgtcaaaccactcgaacgcaacctagaagttgtatgatcgagtgatctcctagtaggatttcccaaaaacactcgatcgcaaggtagagtgagagcgaccacagaacttcaatgacaactcatgcttccataaagtcaaatagactttaatctccaccgacactccaaaaagcccatgctctgtccccttgtctcccatgacgaaaaaagtaaatgatcaagcacaatgacgaggagatggcggaaccgcaccaaggaccggtcatgccaatggagtacactcaagcggagatggatgactacatcactttgtcattgtttcatccacattttatctcattagtagtcattttaatgtgttttgcatacttagacgattttgcattaggattgcatgtgcgcatattggattgttttcaggtactttggatacttttggtgttcaaacagaggagaaataaaacagaaagtttggatgctcaatcacaccctcatccaattactagatcgcaacctcagagtctaacagggcaaaacactcgatcacaaccccgaaaaagctagaagctcagtttcactctatcgcgaagccggaggaatcacccaccaaacaacgcgataactaggaaggccatctactcattctacactaaaccaaacaagctgagtacacgaaagagaagagaagctgaagaaaccactcgttcaccactgatatggttcaaattgctttaaacctactctctcaaataagagattggttgcagtacttaagggtcgaatttcctcaaagttcttttgttcatacaatgaatcaaacgtccagattaagctagcagaaaatgactgaaataaaaagtaaacaaagtaagaaaacatctgattgatttgatgtgaaacattaaataaagaggtaggagtagggtattctcaggaaattattggttagtagatctaatgatagctaggttattatcgaaccattcttaaactcaaactctaattatggaataactggtggtgttccgcaaaacttcctatacctatagctaagaataaccagagaagccgagagatctttaacttaaacatgcattttaaaaaagttcaattgttcaccttagtagataggtcgattcttattacacacctataaaccaggctcatcaaataatagatccaactacagatacctatcgcgagtatatctattgtctggattcaagatctagttaattactctagatttagcattaagaataatcaaagatgaggaattctaaagataacctagcaaagggggcgatctactaaaccatatgaatccctaatgagaaaccctattcttaagaagcaaactactctgacatattgattgaaacaagcaacacaattgagatagaaagcataaacacagcaaataagattagagtatgaaaggatctcttcactgtatggaaaactggatgaatctctgaaaatagggatgaatagcttatgtctctctgaaaacttggtaggaaagaacttaataggtataaacaatgacctctaaaactatatatatgccgtataaaagggtcatggactaataatgcaaatagagaagtcttttggggcaaatttccacttttgtaaacttgaaagcgtcatggacttttctgggccaaaactggtatcgattgacaccatgactgtgtcgatcgacaccaggagtgtgtcgatcgacactctctctgaatctggaactgaaatcgtccttagcttccttttccttagctcttgctccaaaatgtctccacatctccattgtcgtcccactgcatagaatacctgaaaagactcgggaaataacataaagactcgaaatcctaaatctaaaacatagataaaatcagtaaaaacagggttatatagaccacctcaagacatcaactcgatcgcaccactcgatcgcaaggtcgctagaccattccatctcatcttcactccttaccactcgatcgcaagatagaatccctaaagcccagtttgattcatgacatactcgatcacagggaggcccatttcagcccatcaaatgctcgatcgcagggtcccgacgtgaagattactatctatctagtttccttattgtttaatttttcttttataaatagcctctaggggttttccctagggtatccatccattatcttaataccatcttttcgcaaacttttgtagccgcaacactctcctgcgattttgtattcactttcaagtttttgatttttcagttttcgtttcatcctttatcatttctgttatcatgttatcatttgttgcattgctattgtttttgattatgtatgggtagtgaactgtatttctgaggatgggatagagtagttgtagtgtcctgggtcgctttagttagttgagtttagaatattagagtcccttctggattagttgcacttattgcttgttcctttttgatcaactaaaaaatgaatcagacatttccgcgctcaaaaagcttttgatggaatgtcggatctattaattccagcgatattaatctctatcccaagggattggccgtttagaacgggtattgggtttaacaagttgattcatattgccagcttagttagagatcgctagtggtgcttaaattagtgtctggcactacttgaggatttgttgcacggtagtgaataaatcttttgttgaacttgttgtttagggatagcttctatgaagtttttgtcaaccatctaagtagattaaggagaccacgctattcgattacctcatccttaagaatctctcatccatttgattgcctgttatcacttctgctttgttattcatctgcctgttattgccatttcatattttagtttcatttcatttctgttattgcacattaggactattagaaaccaacaactctccgcttggcttgacttagtgcattctaatcatatctcatctgttagcatcacactagattggatggacaacctaaaatactacaacgacacgatagtgttttaggattagttgttcgaaaaacttattatcaagaattctttcaattacataaaaaacaattatcatatttagaaaacaataccaaaattttttgatatagtaaaatattagaattaaattcaaagaaaaactaatacgaatttaagcataacaacaatgctagaattatattttaaagaactttcttacatataatctatacatatagttgatacatttatatagttattaatttatgattttgatgagaccatatatttgcatataactttcaaaaaacttattatcttattaatttatctacttatcttactttttacattgaacccaactagggaccggcataatttataaatttattgaggttattagtttatcgaatattaatttatagaggttcaagaaagattgtacaaaattcaagaaggatttcatgaaatcagaatatgttacgcaaaaaaaataatttgaatttcatgaaacatttcctaagttgcttagaatcctttctaaattttgtagaatccttcattaatgttttttaggggaaaatttggcgtaaaagtttttgattgaaaatttttgactgaattttttttacaaaaaaataagaaaaatactttctaatacccttttcatgatgccccttttcaactctacccttttgttttatccatttttatttctaccctttttaaatttttaatgaccattttacccctattttgaaactgttttaggttaacaaaatgaaatattaatatttttcgtctaaaatattccaaaacaaatttcccgccaaaaaatttcgaaaaaaaaatttcctgccaaaattactttttcaaaaaaaaaaaatcccgcaaaatattttttttggcgggaaatagatttacaagagattttaaaagggttttaaaagatttacaagggattttaaaatggttttaaaatatttacaaggaattttaaaagaaagatttacaagggattttaaaagggttttaaaagatttacaaggaattttaaagggctttaaaagatttacaaaagttttttaaagatttttaaaggtttaaaattgttttaaaaggattttaaaatatttacaagagattttaaaagggttttaaaatatttacaagggattttaaagggctttaaaagattgttaaagagtttaaaagtattttgaatgatttacaagggatttcaaaagagttttaaaagatttataagagatttttaaagggtttaaatggagttaaaaggatgtacaagggtttttaaaagttttttaaaaaatttacaagaagaccctttaaaaactcttgtaaatctttttaaaaccttttaaaattccttgtaaatcttttaaaacccttttaaaattgcttgtaaaacccttttaaaacccttttaaaatttcttgtaaatctatttctttccaaaaaaatttacaaggatttttaaaagtatttttttggttgagaaaaaatttgccgggaaaaaagtttggcggaaattttgttcggtggaaaaatttcagtttccaattacatgttcttattagatgaggataatttggtcattttaaaaatagacaacataaaagagtattgttgaaaaaggatagtaaaaaaaggtagttttgcaaatctcccaaaaaataatatctagaattttttttgattgttatgtattattaaaatatttttaattgttaattttaataataaaaataaaaataattattgagtgctaattttgtctaaaacatttcttaatactaattttgtccaaaaaactataaatagtgcgatatattggaatttctcaattttatatcaactaagaaaatatggcaattaaatctatttaaattttggatattttcataatagacaacaaaatatcttaaagttttgggggctatttgtgtttctctaaaagtaaagtggtcaattagataatgtacgaaacaaggttcccttcctgaaacgctcatcatcatcaatcgacgccgtccattgtcgcacacagttccatcaattagggctttcgtcagccggaatctccaggttaactctctctctcttcaatttccgatatagtttcgatgttttcttgttcaaaaccctaactttatctcttgagatacgattacgaattgattgaaactaccttgtcacagagaacaaaggcaatttacagtaatggcagagactaaaccattgataggtcttacgtgggaaccaaagcttccaggcttatccttagacacgaaaacatgttccacttcaagcaaaagagttgagagtcacgaaagcagttctctctggatgtctaagtcagagcttgttgatggtctttgtcttcctcctaatgatccaaagaagattaataagatgattaggaaacaaatcaaagacacaactggttcaaactggtaacattgctttcctttactcagattatatttaccctttttgtttggttccgagattacattattttataactgtggataggtttgatatgcctgcaccaacaatgactccggagttgaaaagagatcttcagttgcttaaggtaatagattctttgctttgttgttgttgtatttggtttccaagtcctaacattatcctaattgtgtatctattgtagttgagaactgtaatggatcctgctgtacactacaagaaatctgtgtcacggtcaaagctagctgaaaaatatttccaggcaagtttcagaacattaaactagattaaagacaagaacttttgtttcggcttctgtattaataccaacttttgttgtttcctttctgtgaaaaaaacagattggtacagtaattgaaccagctgaagagttctatggaagattgactaagaagaatagaaaagcaactcttgctgatgagttggtttcagatcccaaagtttctcagtacaggttagttattgccactgtgtattaagaagcaatgtataggaaatgcttagattctgtatcataaacataaacaagattgtgatacgtctctaaatctggacttgttaatgaagttggacctatgttaatcgtagaaattttcggccattgtcctggtgtgtataatgtttgtttcactttcatggattgcaatattgcctacgtttgtgtcaagaattatgttaggcgttagtataagtgtatggttatctattcaaataaagtttgtgttgagaattgagatgttgtaactaagatgatgtgtgcaaactttgctaagtgaatgtgtttgtgttggttatggttttccaggaagcgtaaagttaaggagattgaggagaagagtagagctgttacaaataagaagtggaagaaaaagggaaaccaaaccacgaacaaaaagcaaagaaggaactgatttacttttgttagaatatgattatagttttgggatacttattttctgttttgattagaatattgatcatagtatcgggacacactttctgttggtgctatagattcaccttaccctgtaatgactcttgttgttttatgggcttcgattaaaggatttctgttatcggttaagcgatgttattttgaaaatggtggttatgacacatcaaaaccaaaccatgtaaagagctactaactgtgaaaatggtttaagcaagtaaaaattgtgtcgtagtttacagttctgcagaattgcagggtcaaatcacgagggcatgagtgtttacttttaggcagcacttatctcgcttcatggttttgggtcatctggcactactgaggactgaccatgtcacacatcagaggctaaaataattacacaggccggtttattctgatccctaatttacatccctgctttaaataagaggatatgttgaacaaacataaatcgatcaccgaaggaggtataataaactagtctcctcagtcacatgctgaatatatatttgttattataccagtcaatttctctttttcagggtacaaacgtcgagctccattttctttcaaattctacatgatgtcgctgtccagtggtgcttctttctttgttcataattttggctgcacgcggtacagttaccagccatccgatgcaaacttttcaggttcgagttgatgaaacattttgtcgccttttggatgtgatttgttctattactagagtagttaaaggtaactaagagtgactgacttgtggtgcattgttttttgttttccaaatacaagttgagtagagtataaatcttactttgctgattgaataatgttgcataggagagaccaccagtgagcccttctcacctcgcgatgacagtgcgatggattgctgattgccttatttgccctcagatgctttcgaatactttcgatgatagccaacgattttacttggtaagaatggtttcaacacacaatcagtttagttttgctcatgttcatttaagaaagaagtggagggatcaaagttgatattaagattcctgtaaaaaggaaacaataacaagatatatagaaaaataaaaaaatatttttaaacaatggaaattttctaaaaataaagttttgttattataaatacttaatttaaaactaatcagagtatatagtttttattttaaaattttattaaattgacaaaaatattaaaataaggaaacaattctaaattttaaatttcttatcaaaatatgtaaaaatataataaataataaatataaagttataagttttaaaactttataaatatatatatatatattatatatatatatatatataatataatcgatcattataattctcactaaatttgttagattttaattatgatagccatttcattggttgatattttaaaactttattcattttttaaaaaaatagtagaaaaaaataattatgaaaacatatttcagcaagttgtgtatgaacctttgttattagaatacataaaataatccatactagtgtcacaagatttgttattattcaatcttctaagttttggacatatatctatccaccattaaaatattataaatatccagtcacaattagctattaatattttcagttttattaaatttttatacataacatacttacataaaaaagcaatatatgaaaataagttaaactagattttaacttgtggtacactgcgtgacgatttctttttaaaagttagtatatataaaagtttgcaaactgtatctatttataaaatatttatattttatagtttacaattgttatttaataatggtataccagaagtatacagaacagttgttaataaactagagatttaacccttattaaaacgggagattagcaaaactaccctttttttactactcttttgcaacaatacctttttatgtcgttcatttttaaaaatacaccttcccttgaacagaatgatcaaattaccctcatctaataagaacatgtaattggaaactgaaagtttcggcgccaaaatttatttttcctgccaaaaaaattttccgcaaaactttttttcccgtcaaaaaacatttcccgccaaaaaaaaaaaaaacccgccaaactttttttctcgtaaattttttttcgcagccaaaaaaatgcttttaaaaatccttgtaaattttttaaaagctttttaaaaaaaccttgtaaagttttttaaaagctttggtagttgttaaaaattcttgtaattcattttaaaacctcttaaaatctttataaagtttttaaaaacatatgtaaatactttaaaacccctttttaaacctttgtaaatcattttaaaaccttttacaatagtcttacaagatttgcaatcgtttgttaagcataagtaagtggcattgaatgatttacaagggattttaaaagcttataaaagggtaaaacatgattacaatcgtttttaaagcataagtaagtggcatataatgatttacaagggattttaaaagtgtttgcatggtttacaatcgtttttaaagcataagtaagtgacattgaatgatttacaagggattttaaaagcttttaaacctttgtaaatccttttaaaactcttataaagtttttacaagcattttttaactcttagaaaaaaattgtaagtatttaaaacatttataactctttttgaaccattttaaaacttttgtgaacctttacaaaaggttttaaaagaatttacaagagtttttaaagggttttcttataaattcttttaaaaaattttaaaaacccttgtacatctattaaaccccttttaaaccctttaaaaatctcttttaaatcttttaaatacccttttaacatcccttgtaaatctcttaaaacacttttaaaccctttcaaaatccttaaaaacccttgtaagtcttttaaacccttttaaaatcctttgtaaatcttttaaaatctcttttaaaaaatcttgtaaatcttttaaaacccttttaaaatcccttgtaaatctatttcctgccaaaaaagttttttttacgggaaaaatggttttgaaaaaaacttttggcgggaaatttgtttttcgaaaagatttggcgagaattttttttcgaaattttttggcgggaacattttggcgggaaatttattttggaatatttaaggcgaaaaaatattaatatttcattttgttagcctaaataaatttacaaatagtggtaaaatagtcattaaaaatttaaaaagggtataaataaaaatggcaaatagaaaatggtagaattgaaaaggggtagtgtggaaagagcattttcagcaattattctattaaaacggtatataaatattatttaattattgattcaaacccgtttgccacataatcttgatccaaaatataacatatcccgtaattgcttaacccatcacatgatttattttttaaaatagtgaattttaaaatttagtgattctttattatcgagaaaattttgcaaattgtatcattctctgggatatttatatattattgtttcaaatttttattaagtagtattatatcacagaaaccttttttgattttatacaattttttaaaaaatcagattgaattgatatgtctaatattggtggtgttaaaaataataaattaaaaatttaactcgtattgaagcagtgaattagtgatattttattttttaattaatattgattcaaaaattcgtcttgtcaaattctttctgccaaaacctccatttattttattaatattgatctcatttataatatgattattaattattgtctaaacattttagccgatatgggatgttgaacccatatatttttcgtcaatttggtaatatatgtttttaaaatttcaaattataatatatgcaggaaacaaaattgagatttgtttttacactttatattatatgatgatttaaaacaattaaaaaatcaaataaaataataggagattaaatcttaaccaaatattctaaatatatatgttgttaaatttgaaaattaaaccgatccgaccaaaatttaatgaacaaaattatgaaatggaccgatatcaaattgacccaaatgcattttaccctacccaaaaacaattgctacgaaaatactatatagatgtaaacctttgttattagatatataaaataatcaatcattatatctaagtctcattaaatttttaaaattccatcttcaaccacaataatacccactacataaaaataatttatcactattttcaatcaattcaataattttaatttaaaatttaatatttgatcaattggatgaattatttatgagttaaaaaaaagatgaaaacaatatatagaaggaaaaatatcctaccaaaacaaatatatgaaaggaaaggcatatgaaaggaaaggcaaatggaaacttttgttgttaagaataaataaaataatttatattagtctcattaaattttttaatattctattttctaagtttgttcacatccacggagtaatttgtttttttactttccagccgaataattaagcaagaggtaaaactaattattaagcaaaaggtgtgtatatatatttatatgtgtgtatataatttatgaatttaatataaaacattataaaaaaattccaactgactaattaagcaagaggtagagaaaattattaagtaagaggtgtatatatatatgtctatatatgaatttaatagaaaaaccaaattctagaaaggagaaaaaaatgacaatatattgaagcaagaggtacatacattattttaatatgaatacataaaatactctatatcagtttttactaaaatttataatgttattttataagtttactcacatctaactatccacattataattttaaatatttaatcaaaattaaatatctcattaattattaatctttattgattttctatattaaggtattttagatagagcttgtagagtttatctgtatatttcagattcatagttttatattataatacaaaataagtccaataactaaaattttagaaacgaaatttgcatacttaagtgaaaagaaaatagatatagtcattacaaaaaaaaacatgttaaattacgtattgtattattgaacgtaacgtcggttacaaaacgacttaaaactaatattgttggttcacaaacagacttaatattgtatgacgctaatattcattaactttaacctcatttacgaagatttttgtaagagtttctaagcataaaaaaataaaaccatacaaacattttatgccagatttatgtaacaaacctttctttagtgagacactcatatgactcatcgataaatcctcaatttttcgaaagaagaaaacaaaaatatcgataactaatattctactcgttttacaaaatgacttcaatagaccgatgtcatccatcatatttctttgtagtgagtaaagaagcgcaagggaattaactgataaaataagagaccaaaatcattgatgatactgaagcatagttaagattttatgttatagaagaaaaaagtttagatgaaatatgtatatggaaagaagaactaattacttttgttatatatatatatatatatatatatatatatatatatatatatatattttgttgtgttgactaattatgggattctttttaacggagatagataaagtttgatgtggttggagattataaaatattgttgagatgatagtgaatttatatatgaatatcatttaaaaattaaagtaagacaaagattgagaagaaatattgtaacgtcccgaccgtctttatcagtaggctccacgttctctttcgtgttcgtgggtctactcctatcagacggtcggtttgctacatctgggtaggtttaaagatttttattttactgatccaagaaatcaccacatgatctttttccatgctttgtttgcattcgcatggttctgacaatcacttctcggaagttcacacatccttcagttacttcagcccgagcacgcttaactgtgtagttctcttagaacatttgaccaaaaaatataagtgttctttggtgacataggtggtcaaatcaattatgttacacctctctatatgcaccatcatatttaagaaatcgaggtgttacaaatacataaataaaatgttatgagttaagatatagaaattaaattcataatcaaaaatgacataaataataggaagatgaaaataatgttgtatgacaataataacaacataaagtagtgattaatttagaatattattgataatttctatgttatttactctcctctcatatttattttacgcaatataataatattatttatttggagttatattttataacactttaccagcatgatcgtctctccgggtgattgtctaactgatcgattgtatatttatctaaacattttttgaggtaacctttaaattatttatattcattcatataaaattatatgtatgttatttttggagtatgagactatgtctcctccttaatcgaataatagctatgcctattcgaaatactataaatggcttaattttaaataattatttatttatatagataatcatatcaaatctagctaagctcgatgtcgttgcatttgatgtatcagacaaaaattatatgacatgggcatttgatgttaagatgcatataaaatcaaatgggcttcttatcaccatagatgcatctcaaacgacatcaaatgagagcaaagataaagccatggtatttttatgccaccatctgcacaacaatttaaaaaatgaatacatcacgagagaaggtatggcaatcactttaagatcgttttgatcataaaaaatatgtgattgtcaaaatctaaacatgaatggctaaatctctggtttttggattacaaaagtgttggagattataattctaccatattcaaaatcacctccaagatgatattatgtggtgaaaaagtgagcgattatgatatgattgaaaaaacactttccacctttcatcctgaaaatgtactccttcaacaacaataccgggccaaaggatacactcattatttcgagttgatgcaagtcattttggttgctaagcaaaataatgaactcatgatgattaatcatttatctcgcccacctcgatcagctccacttttaaaagtgaatgttgttacatccggtgatgataattggcaaggacccggactttggcgaggccgtggtcgtggtcggcggagaggtcgtggtcgtggccgaggaaaagaaagagttttttcatcccaatgattttaacacggtaaaaaccaacaaaaatcttcatgtgaatgacgttggccatcttaaaaaaagggatgttgaaagcacttgccacatatgcggcatgaaaagacactggtaccaaacgtgtcgtataccaaaacatttagccgatatgtatcaagcctcacaaaagataaaagaaagggatgttgaaattaacctcatatgtgatgagtcgggaccgtcctttaaatgaaaagacgatgatactcatcttgatatggcagattttctcgattgattatgacaatgagaaaattaacatattatagctatatatataatcatgttatgtatgaaaagcattatagatgtttttgttttctagaataatgtttttattgtaatatattatgacatacgaatagcatatgtcaagattttaatgaataaaatattttattttagaaaaaatatgaaaatacgagattgagaatgaagatatatgtctggcggacagtgcttctacgcatacaatctttaaagataaaaaatactttgcctctctcaaaataaattattccgctagaaacgtgagtactatatatggccatgtaaagataatattaggctttggcgaagccaattttacaatgccaaggggaactcattttaagtaaatgatgcattatattcccctaagtctcatagaaacttgataagtttcaaagatatccgaagtaatggatatcatatagagactatgaataaagatggcattgaatatctttgcataaaatccgagaggcaatatatattagaagaattgccaatgctatcctctagattatattgcacaaaaataaatataatcgcatcagatgttacagtaaactcgagtgacaatcactcgtgtgagtttactagtacatttaagatatggcatgaaagacttggacatccttgatcagtcatgatgcgaaaaattgtgcaaaattctaatggccatccattgaaaaaccagaaaatatttaaatctggtgagttttcatgtaaagcatgttctcaaggaaaactcataataggactatcgccaactaaagttgggaatgaaagacctgtattcttgtcgagaattcatggtgatatatgtgggccaatccccccaccatacgggccgtttcgatattttatggtataagtttacgcatctaatagatgatcacatgtatatcttttgactacacaaaatacggctttcgcaagattcatttcgcaagattcatcaggttaaaggcacaatttcctgattatgccataaagaaagtcaggcctgataatggtggagaatttactttgcgagcctttaatgactattgtgtatcgatgagaatcgatgtagagcatccagtctctcatgttcatacaccaaatggcatggccgaatcattaattaaaaggttgcaactcattgcaagaccaataatattgacaacaaaactcccaatttctatacgggatcatgctatattgcatgctgcagctttggttcagattagaccaagcgcatataatgtatattcccctttacaaatgacttatggtcaagtaccaaatttatctcatctccacatttttgatgtgaggtatatgtgcctatagcaccaccacaaaaaacaaaaatgggacatgttgattctgtaaatcaaacaatgaatttatactaaggggttagataaatttacttctctcttggctctatagtaattaaaagaagatgaacaaggttgcttgagtaaaaggtagggttttgctgtgagaaaagtagtgcttagtattaggtcaaaagatgattcgaatagaggacaaaacccctttatttatacaatgctctgatcatatcaaaatatgataaacttctaattatgtaggacctaaaacttcattacttctattcttcacaagatcctcttctctcaaaatggaaggcttctctttccgaagtttaagaagtcggctggacgatctcagctgtcgaattaggtcttctggcgaactcataacttaggcccattaataggccaaccgggatatcctggttaaatcgaattctcgattttattcacatttttctccggttcaaaccggtattgtcggaggtgccaattcctgcaccaacaattagtccccccagttcgggcaatcgaagttgcctaattcaaaattccgaacttagaaaacgaatattcggttcaaaccttggaatatgtgaattaatcattagatttccgaatcgattcgtatctccggacgcgttttgacacgtgtcactacctcgcgtccgtacgcgcgcgtgaagttcaggaaccgaagcgtctcgtacgtttaatgatgacctcgtaggtttgccgcccattccttcctatttatactcgactaaaccctcgaaatatcactttccaccgcttgcaagaagaatcaaaggtagctctcgttcttccctctgcgaattattttgcgttctccgttcttttatcgatttttccgataatgggtaaagctatccttgtttctccgtcctcttcttcttccgagagcgaaacaatgttagttcgccacaactctcgatttgctgaaaaccgaagagatgaggttcaatctagtcgagctaatcagatcgaaattccaacgctgctagatgaatcagatcgggagggtcccgatgaaaacccagctgttcttcctgaagaacatgtagactacctagatcgattcgatcccctcatcgatctggaagacgcttataacgttcacgtgcaatacatagaggctgaagttgaggcgaggttacttcctatggagaccgctcattttgatcttgatctgatcgttgactggaacactgagatcgctacgagtaaaagcctctcgacggatgagtctgttgcggaactgtttgctctctgcgggtctggagatcgcccgatcatttacatgattcctggtgaagatgatcgtccttggagtcctcaacggggatatgtgtgtttatatgaggcctacttcagacaatgccatctctagtttccaatcccatctttaatcatttctttcctaactcgccgtcgcatggcaatctcccagctcactccggcggcgatctgcaactttgttgctgccttaacttttggtgttgaagagggttatcgggtgaatgttcgttgttttgaagaaatgacgacgttaaaatccgttaggttgcttagatacagggtggtaaacaatcgccctaagtataacttccttcctggcctgaaggtcagcaatttcaagaactgggaggagtactatttctacgttatggttgatcttgaatcccacgagcgtccgttctcgggaaggaacaggatgggggcacaggatcccggcagacttctcttaaatagattggactaaaaaagtttcgactttgatcacattctcataatttttctgtatattgcagctcggtacaagtctagcccagaatgttctgttgagtttgtaggagttcgagaggcgatcttccgagctcgacgtcgtacgtggaaagacatcacgaggtcgcgagtcaacaacatcatgggaaaggtcaggaagtcctttattagcttcgcctcaagactcctgaacatgccgcctcctcctgctcccgttaaagaagaggctcgtccttcagacgatgtggcggttctagtgatccctcctgctaactccggctcttttgacgttgatcaggtctctcgtgagatcctagtcgacctagattctcaagataggacatgtcttgaagaggctggaggtgttcaagctcaagagatcgtcggtgacgatctaaatcaacctattcatgctcaggccgtcaagcctgaggttcaagttgtcacaagcgaacagcctgctgaagttcagactgccactttgggaggcgagaaggtcgatgtcgacctgaccaaccttgattcaaacaaggatggcagtgatgctgagatcgggactttgagaagatcccgcgaggaaaaagggaaaggagtggacaatcagtccaagaagagatcagcttctgaagccggactaaatgatgaagcccccgcgtcaaagactttctgtatttataggggcgaagctcttaaccctgaatagtttacattcaagtatactggcgacaaattcctcgtacgagatcgcgaagctgccagccatgtcctgcgcaatctgatgcttcccagggtgagagaattccccaaccctgatgaattgatcctgagagacgagtacaagaagtttgtcagatcgtcattagaggtatgtgccgattccactggcgttctacttttactctgtactacgttctaacaaaaatattatttctccagaccgctgctttggcgaacgaccttattgccacgtacgatcataagcagaggttgaagctcgcagacagggatgccttcgacaacctgaagaaatgcacggacaaagcgaaactcatttatgcgagggacattaaggagatggcccctttgaaggatgctgcggagacccacaaggtggagataagctcgctgaatgacgaggtcgccacacttaatggtcgcaaggttgatcttttgaaagagatcagtgatcttcagatcgcatttgtcgtggtgaaagagcacggggagaaggaatgcaacaggctgcagactaatcgagatgcgaaggttgcacgcaccactagaaaagcccaagctcgtttcgacaagatgaaggcctatctcaacgagcaagagaacatcgttaagcccaaggtggattcccacaatcaagcttaaggcgctgaagaagtggttggcattctgatgaagagaggtgcgaagattgcgacgtccgagctagaaggacttaatgctttaactcagaaggtgaatgacgaggtcaatgccttgaatgtcatcgagttcggggatgacgacctgaacatgtctccggaccagctcggtttttcaagacaatcctctcaagttgctcctgtggcagatcagcatggttccagcgtcgatctcgtcagccgaagtgacattcgccacgttagcatcgaggagggtgaaaagaatcaaacgacctaaagaggtcgttttgtacttgtatttattttaaaacaattcgatcgtggacatgatttaggggcgatctagatattttggtttgaccgcggacccattttggggcggttaaaaaatacttattcaaccgtggatccattttcggggcggtttaaatttaatttctgttttctacgttttccaaagtctttcttgcttcattcgaaactgataaaaggaaaactgtcatattttttgtttttcctttttgaaatttcccatttcttggaaaaggaaaacgggaacttccaattggcaattaagtaaattcttggtttcccaattttgggaaatttaagtttctcatcttttcttgtgaaggaaaaagcgagaatttccagatcacttttaagcaaattcccaattccattttcgtgttcagccctataagtacttctttaggcatcaacaattttctcattggcctttcttcttctttagttgcaagatggagagtgctggatcctccttccttgttagcaaaaatgttccaaccttttccaatgctgaagcgatagaacgagggatgccgttcttcaacaacattcgtgttccatggacccttctgttccaggcgaggtcagaggcaagacgtgaagcggaagggttcctgtcgtgtgttgaatctaggtacaaggagtattgcaagattgtgagctactatgatgaacgcaagtccgacatcgtccataaaatggccatgttggagtcgcacccacgccattggatcaaaaatagttttcagtggttggctcccatgccggatgtcctattgtcatactgcaatgattgtgcccaggatgccgttgtcgcctcgaaagagaagaatcccacaattattgctgatggagacttcattcccagaccgcctcctttgttctatcttggattggctgcttccgacgccaagaccaccgtgtgtcagaacttcattaaccaggtgagaactgttttaatttatcgtttggttttggagtgattcttataacttcgttgttttggctcttcaggtcggatttatgcaccaagatcagtgccgcgagctgcagtacttccggactaagaaacgaaaggtggattcccgcctcgaggagcttgaagctctgatcactaagctgaaggcgaagcgaagaaggatcgtcactcgtctggatgaagtcgaacagacgatcagagcgctggaaattcgctcagaggattgggagaaagttggtcttcagctggtgtggcctatgccagatcgccttctcagggacaaccgcgttgttttcgaatagggcgatctgatgctttatctggcctgtagctcgcctgaatgctgtgaaatgttctcttatcatgcctttgtcgtgatagaagatgatccttagtggcattcagatcgtttttccttctgttttttatcgaataaacgcccttatgatggctaccgatcttgtttgatcgttttaattcttttcgaataagcgtttttgtaatgattaccgattttgtttgatcgtttattaatatcatatgattttgcttcacaagtttaattattttgcgtgcgatcttcgagatcggcttttgagtgacttaagttttgaagtaactcaattttttctgtctaagttcgaactagatgttaagtgcgagacttagctcggctttttcaatgatgaaagtattcagcgtgtactggacacgagacgtctctcggcttatgtccaataggcctatgtataatttaaagagggagttctgggctctgttttaagaataagtgaggcagactcagcatattaatggggagcgagatgctgggctcggcttactccccgtagagcatctgttcggtagatcgcgaagtacaaggttcagcttatctttcgatccaaaccagagcttaagtgcgagaaaactggtcttggctatccttattagaaaattaagtttctaataaggtgtggattatttcaccactgcatccatgtgagacgcacatcaaacacctggccagggcgccgagagttgacttgttaaagatcttaaagcaaactccgtattgagaatacaaactttaattttattaagtattatagctgcatccttgagaatgactgcctacgtacccggtgaagggatcaagccattcgttgttcgtattacataaatgagattggaagggcgatctgcatatctatctatatatataaatatatatatttttttgttctaaatctagtagtagtacctcttaaagtggactgcgttccatgtattttctacttcttccagcttcatggtcatcagcagatagactcccgggtgaagtatgataagtgtgtattttcaatgttttgaccatccatttgtcatcactttagcatcatatcatcactgttttataccatttctgatcatttgacatcactttgcatgtttaggatagttttgcatgcatgttgcatatttgtgttgttttcaggtgattcggagctggtgacgagctaattggaagaagtggacctgatcatgtcaaaccactcgacccccaggtcgagtagacgcttcaggacctcaacagaccactcgacccccttgtcttcacctccaccacctgaccatcactcgatcacgccactctacctggaagtcgagtatcaccatcaccaccactcgactacatactcgatggcgaccttcagagtcttctccattccaaacttaaccagacactcgagcacaaggaagaaaagaagactccagcttatcactcgaactctcactcaaccacctgggtcgagtacagttcttaatccgtcccaatactgcgtcattttgagtattagggttttggaatattttgtaataagtagcatgtactttacattttcgagaacaagtttttatctaggttttattccgcaaacactgtgttctagaccttttgtaatccggatttctctttatctattcagtattcagtatttgttcttgattttcgtttcttgttgttcatccggttatcatcttgctattacagtgttgttatcatgttttcattctgttcaacgtttatgttctctacaatgatgtctaagtagtgaataggtttctgaggatgggttagagtaatgtagaattctcaatatgccaggtggttgagtttgattgatagatcctttctggattagttgttcttaatgcctattgctttctgatcaactagaatttgagcccagatatttccgcacccgaaaggtgttcgatgaaatgtctgaaccactaattctagagattcgtggccctgtaccaaggtattggttgcagggagcgttttggctttaacttgttgattcgtaatgcctgttaggttggctctcgtcaatggtgattgagtctgggactaggttaacttgagggtctctgttgcggtggcacttagatttggttaatgaacttgttgtctagggataatttgttgagcatgtcaatcacctataaactgacgaaacgaaactactcaattaccccatcctcagaaattctttatctgattgaatttattgtttactctactattgtttactacatcttgtcatctgttgcttagtttctgcaattctttcttgttactcgacatgatactcaaccacccagttgtctggcaacagactgtgcagtcgagtatctttgtttcatttactgtctgttactcgaccagtcactcgacctcacccagtgctctgcaaagagctgtgttggtcgagtgtcttactctttctgcttgattttctgttttctacatgttcactcaggactgctagaacacaccaaaacctgttattgctttgcttgacttagtgacttctgatcacatcttgattgttagcatcacacccatttggattgacaacctaaaatactacaacgatatgattggtgttttaggataattgactaagaactattatcaatttggcgtctttgccaattgggtgtttgtttgttacatttgagatttcagacttgcttagatcaagttctttttcaattttcaaaacggttgctaactgtgtgcttttcttgttgtctttttgatccaggtacacctctattgtatgcaaactcgatcaacaggcaaccagaacctccttttcaatgacaacatcgactgcatagctcacgaactcagagaaaggagaaacacagtcaacctaataccacaacaaccactcgaaatggctgacgaacataatcaacaaaatggccctgccaacattggtgctagagatgcaccaaggaaccatcgtaagaattgccccacctgctatcctgaacaacaacttcgagattaagagtggtctcatctcgatgatttaggggaacaaattccatggtctgccaatggaggatccactcgaccaccttgatgaattcgataggctctgcaacctaacaaagatcaatggtgtcagtgaagacggattcaagctccgtttgtttccattctccttgggcgatagagcacacatctgggagaagaatctgccccatgactcaatcaccacctgggatgattgcaagaaggcttttctatcaaagttcttctccaacgccagaactgcaagactcagaaatgagatctctggctttttacagaaggctggtgaaatgcttctgtgaagcatgggagcgtttcaagggttataccaaccaatgccctcatcatggcttcactaaagcctctctgctcagcactctatacatggagtcctaccacgcatcagaatgcttctggataccgcctgcaatgggaatttccagaacaaggatgttgaagaaggctgggaattggttgagaacttagctcaatcagatggtaattacaacgaggactgtgataggaccgttagaggcacatctgaatttgatgacaaacacagaaaggagatcaaagcgctgaatgacaagctggacagaattctccttagccagcagaagcatgtgcacttccttgttgatgacgagcagtatcaagtccaagatggggagggtaaccagttggaagaagttagctacatcaacaaaaaccagggtggctacaaaggatacaacaacttcaaaactaacaacccgaacctctcctaccgcagcaccaacgttgctaatccacaagaccaagtctatcctccacagcaacaacaagtccgaacaaaccttttgttccctacaaccaaggtttcgttcccaagcagcaattcaaggggaactaccagccgcaactaccacctgggtttgcagctcagcaaaaacaaggtcctgctgctcctgatgctgaaatgaaacagatggtacaacagctgctacagggacaagcatctagctccatggaaattgctaagaagttatctaaattgcaccacaagctggattgcagctacaattacctgaatgccaaagtggaggcattgaacaccaaagtcagatacttggaacgccaatcagcatctacctctacacctaaagttacaggacttcctgggaagtcaatacagaatccaaaggagtatgcaactgctcacgccatcactttctgccatgatcgagagctgccaactcgacctgtccctgacttaatcactagggactgtgatgttcaagacggggaggtttctactcagattgaattctctgttgttgaattcaaccattctgctggttctcgccatctcattcaatctacctcagaagagaaggtcgccataatcgagagaatggtaaaacgattcaaacctactccattaccctcacgtgctctcccatggacattcaggaaagcgtggatggagagatacaagtctgttgcggcaaaacagctagacgagattgaagcagtgatgccactaatggaagttctcaacctcattcctaatccttacaaagatgtgagaaatctgatattggaaaggatcaagatgtatcacgactcagatgatgaatgtgatgcttctccatctcgagctgctgataagaagattgttcaagaaaagttagaagatcctggatcttttactctaccatgttccattggggaattagctttcagggattgcctgtgcgatctcagagcctctgtaagcctaatgccactctctgtggcaagaaggttagagtttattcagtacaaaccttgtgacctgactttgatccttgcggatagatcttccagaaaacccttcggcatgctgaaagatctaccagtcatgattaatggagtagaagtgcctacagacttcgtggtgctggatatggaagtagagcataaggatcccttaatcctgggaagacccttcttagcttcagtgggagccgtgatagatgtcaggaaagggaaaataagcctcaaccttggaaagcacatcaagttgcagtttggcatctacaaaattgcacaagggtcaacagaagatgaaaaaaactctgaagactatagagtgatcccaggagaagggtatgagactaagaaagtaaaagagcttaaaagaggtctaataagcaagaagaaactatagagaggaacttaggagtaagctgagtcagatacagaaggaagctcaacctaaaggcgggattaacactatcccaaaaaaaaagttcacttcaagatggtctgaagagatagattcccctctagaagagaaagaagcctattttgaagaaagaggaattgagtgttctgctgcagacctctccagggaggacgctgattatgatgatgatattagagaggactatgcagaccctctctatcattcattttcttcttgataagtgtgaggagtcaagctagagactttaaacaagctcacttgggagaaagtcccatgtgtatccttgtaaataatttttactttcttgttatttttgatttgttttagttgtgtttgtggttctaaggaagaaaggaataacgtgaaggtagagtaaaaattcaaaacttttactctactgatggcctagagatcgagtacattggtcgagtatgagtgatgtttaaaaacccaaaaaaaaatttaaatcatcattttactcgaccaacagaagctacagaatcttacaaagagtttatcaagtttacagaagattgcaggatttcctggggattttacagtgaacagagagcatagaagaaagacaagaagacacagtgtgacccaccactgacgcccatgtcctccatgcagcagaccaagagacatggaatctcttcataccccatcccttcactcgatctccacgcaaccccatcttcaccttacccactcgacttcttctccttcactcgacctcgttttctcctccataacccaataaactcgaccccatccctcttcattcatcaccaccaacaaaccaaactctcatctctcttatctcaaccactcgaccccatccctcttgaatcaacgctcccttacctcctttactcgacctcggcatctcctcttcaccatcctcttcatatactcgacctcaacactcctctccacacaccaaacttttcgcaactctctcatctctcatcaccgttcactgcaattcaagtcttcaagtgtttgtttccatcactcgacttcatcattctccaacttcaacaacttcactcgactcctcatcatcatcttcttcatggcctcaccactcgaccactcttcgccaccaccacctctcaatcgtctcaatttcactcggccacaactctcttcgcctctccatcatgaccgcttgctccctctctccaaggaaacaactcgacctcgccatttcattcactcgacctctatcaccaagccgccttcactacttctagctcataaccactcgaccaaagtgccattgttctctcatctctcaagtccactcatcacacgacttcgccaagttcactcgattcaccgccaaagcgacaccactcgaccgctcctctatttccacggtcaaaccgcagctgctctcctcctcttcaagctcaccactcgaccaccgcctcactctaaccacgaaactagcttcactcgaccatacaaaatcacttgatcaaccgaaagaaaagaaaaaaagaaaaaaaatcaaaaccgacggtttactcgatcacatcactcgaccggtttgtgtttttggtttgttgggactaacgtattaatgtttatccttgagtttcatttgttttcaggtttcatcatgagtaactacagtggagaatcctcaatggatcctgattataacgtagatgaagcagagtcttggtccactagacaagagagagaagaacacgtttacgagagtttcagagaagaatttgaacgctccgcagcacgacgtaatcagagaagagctgaaatcgccagaggaaagagagcgatgtcgagtagatatgagctgatcgatgaggacatcgaaactgagtatgagccaaagtcatggtgcaaggagacgaagctgctgaacaaacccgacgaggttacagtggaggagtatatcagattctttgagatgaatgacttctggagaacgaggtatccctgctatgagactttagccgagctgggttactggaggacgtgcaacatttgttcgagaagtgtcatctggaaacattcatgtcttaaccttacgtataaggaggagacaatcgagtttctttccacactgcaagtagagatgtatgagggtctcacggactttgagctggataccatggggttagggttcttgacgttctcagtggatgaatagcggtatcagctttcgatcaagaagttggaagaactgtttggtttccctagtggaaagggaaccaaacctaggtttgacagggaagagcttaaggatttgtgggctactattgggaacaatttaccgctaaactcgacacggtccaagagcaaccaaatccggagtcctgtgatccgctactttcagcgctcggttgccaactttttttactccagggagtctacaggcaccgtgtctaacacggacatggagatgatagatttcgcgcttccagggattctccgccgtaaaaagggaaagaatgtcttgagaggcgatctcaacaacgcaccaccagtaatgcctctattgatccacctgtgtggataaaggaagtgggcgttgacaaacggcaagaagaaggtgagaggagcactatgcgtgggtggcgttgtgacgccaattctggaagcttgtggagtaccgctcaaggagccagggttagcaccgagaatgatggacttggatcacttgcgccgatgtgagtttgacatggttggcaactttcaccgctataggttcgagcattcattgattagaatcgccaacattcttctcccctgcattaacgctactaggattctcgagggaaggaacattgatttcaagccttcgcttgaaaatctttatttcgagggcagtccgccaactgaggagattagtcacaccgaaggagctacaacagaagatgttgatgagacagatgatatagatgaggcggagtttgacacaagcatgtatcatttcagtgagcatatacctcgagcgagggatagcaagagtttgagcgaagctcacaggaacaacagcaagctgcagaagtggtgcaagaaacatgataagttactcgccaactccctcaggacatgccctcgaggagatatgacgcgcctaagccaagtcggcacgagcctgagcctagagagcaggagattccgcatgtccctgtgaggtattcattattcaagcctcgtgaatctgggaggaagaggaggaccacactcactcgatctagcagcagaagtagacgccttatgcagtctcatagtttacgcgaccgcggtgctggccgcagcaaaagaagagaggtcgagtatcctcaaagcggtgctggtcgccacaaagctgatgaggtcgagtacccaccctctggagctgatacggaacatggcggttcgtctatagcctgggagcaatcacatgcagccattgacgaccaacttcgctcattcttcgactgaggtaagcgcctcacttcaccattgtattatatcatatcttgtaatttgttctttattttgtttctgtgattggatttgtcctgagtactctcttccaagtttattcacacaatggactgtgtgatttaagtttgtgggagggctcaggaagtgtgtgttgcattgtatatactcttgagtctgcattcatctaaggcatagaaaaaccaaaaaaaattgaaaaatttcagaaaatgatttcacaaaaaaatagtgttcatgtagttgcattacatttaggatcgaatctagagtgtttcatttaagattgttgcatatgcataggggataatgatgagatagccttgtaagcattttgcttcaccagataaacttagtgccctcgttgctagttgtctgttgcatagtcaatgaaattgaagtaaaactgtaccatgtctagattgctctactcgaccacactgtcatgatctgataccattccctatcaatttgaacctgaatctgatctttaattatcatgtctgcatcaaatttaaactcatggataccctaaaatacttggattttcttattcattttgatcactcttgttaatccaagtagctgactctccttattagagtagttaacccaaacccaaacctagattttctttcaagccctatatcacttgtgagtgtttgtgagatcttattccgattaagcttggtagaaagtgtgaggttcgtaacgacagagatagtgtctcatgtagttctagttcgcattttttggattggataggactaggtgggcgcttatactttgggttgagatgtgtttaaaagaaaaaaaaaagggttgattcattgatgagaaaaggtaaaagagtcttggtgaagtaagctaaaaaagcagaaaaagtctagtaaaggttttgggatttgtaaagaaaagaaagagttcttgttagctattgaagatgggcaaaaaccctcggttttaaaatgttaaaaacaagaaccttagtcgttgaagaaatccaaatccgctagatgtatcaaagtgttgagaaagcttctcctagagttaagagaaaagaaaagaatgattagaaaaagggcttaaaagattcatgaatgcaaagggtagagttaagttcttatattgggatgggagatgggattacattagagcttcttttgatatactctgggtagatgggatcttatctctgtatgcatagcttgggacttacctttagcattctactaaatcttaatcattttttgagagatcccgtgttactgaagcctattctgtaagggaccatctttgtctcttgaccttttaccttagtcaaatgagttcattgatgatgcattgcttgattcacgttcctgaactaatgaatgttaaaggaattggtagatttgaaaacatgtgtaggtcgagcatatgagtcggattgattgataataaggcattactaacgtttttgagtagaattcgatcatatcgcagcttagaactatcaacttggacattgattacatctggtttatctggtgctttggctctgagtcctggctttcaaacttcacctccggcttgttcttaattgtttgcttgagggcaagcaaagactaagtttgggagagttgataagtgtgtattttgcatgttttgagcatccatttgtcatcactttagcatcatatcattactgttttataccatttcagatcatttgacatcactttccatgtttaggatagtttgcatgcatgttgcatatttgtgttgttttcagatgattcggagctgttgacgagctaattggaagaagcggacctgatcatgtcaaaccactcgacccccaggtcgagcagacacttcacgacctcaacagaccactcgacccccttgtcgagtaggggacttaacaatttcacctcatccacttgaccatcactcgatcacgccactgtacctggaagtcgagtatcaccatcaccaccactcgactacatactcgatggcgagcttcatagtcttctccattctgcactcaaccagacattcgagctcaaggaagaaaagaagactccatctcatcactcgacctctcactcgaccacatgggtcgaatacagttcttaatccgtcccaatactgcgtcgttttgagtattagggtttcagattattttgctatcagtagcatgtactttacattttcgagaacaagtttttatcaaggttttattccgcaaacactgtgttctagaccttttgtaatccgaatttctctttatctattcagtattcagtatttgttcttgatttttgtttactattgtttatcctgttatcatcttgctattacactgttgttatcatgttttcattctgttcaacgtttatgttctctacaatgatgtctaagtagtgaataagtttctgaggatgggttagagtagtgtagaattctcagtatgctaggtggttcagtttgattgatagatcccttctggattaattcttcttaatgcctattgctttctgatcaactggaatttaagcccagacatttccacgcccaaaaggtgttcgatgaaatgtctgaaccactaattccagagattcgtggccctgtaccaaggtattggttgcagggaggttttggctttaacttgttaattcgtaatgcctgttaggttagctctcgtcaatggtgattgagactgggactaggttaacttgagggtctctgttgcggtggcacttagatttggttaatgaacttattgtctaaggataatttattgagcatatcaatcacctgtaaactgaggaaacgaaactactcaattaccccatccttaggaattctttatcttattgaatttattgtttactctactgttgtttactgcatcttgtaatatgttgcttagtttctgcaattctttcttgttactcgacctgatactcgaccacccagttgtctggcaacagactgtgcagtcaagtatctttgtttcatttactgttggttactcgacctcacctagtgctctgcaaagagctgtgttggtcgagtgtcttactctttctgcttgattttctgttttctgcatgttcactcaggactgctagaacacaccaaaacctgttattgcttggcttgacttagtgacttctgatcacatcttgattgttcgcatcacacccatttagactgacaacctaagatactacaacgacatgattggtgttttaggataattgactaaaaatcttttatcaaagtacctttgaaatcaagtaaggtccttcccattgagctccgagctttccgacgttcttttctttggtgttactgaagacttctcgaagtacgagatcacccacgttgaagcgacgttctcgaatgtttcgattataatactttgtcgccgcattctggtagttttggatccggatgatagcttgatcgcgatgttcttcggcgaagtcgttgtgatctcatagctgtcgattgtttagtccagggtcctccgacatcatgcatctgcgtaacgttggaattccagcttcgctcagagccattgcctcgatgccataagctaaggaaaaaagagacaatgacgtaggtcgtcgaggggtagttcggtatgaccaaaacacgccttccagctcgtttgccaaatttcttttcttgggatcgagtcttttcttgatctcgactatgattggtttatttgtggcctcgatttgtctgtttccttgaggataccgtggagtcgaattgctcatgcgaatgttccacttagcaaggaagttcctggtgatgagtgagacgaactgcttcccattattcgtaacgatctcatagggaagaccgtgtcgacaactaatatttttccaaatgaatgcaacgacatcagttgttttaacctcgtagtacgcctgtgcctcgacccatttggtgaaataatcggttagaactaacagaaatcttttagaccccgacgggggcattagtcccacgatgtccatagcccaccgtatgaaagggtatggcgttgtgatcgagtgcaatatttcgggaggaacattcttcatcaggccatgtcgctgacactgttcgcacttcaccacgtaggcctcacagtcagccaacatagttggccagtagtgaccatctttcttgattttgagagccaaggctcgtccgccggaatgattaccacagtcctcattgtgtgtttccttcatgattgtggtggcttccttttgatccacgcaagtgaggaaagctcttgtcgcacttcgcctatacagcccgccatccaccatgatgtaatttgccgccattgtctttagacggcgagcctcccatcgatctgccgggacttctccgtaggcgatgtagagttttatgggatctagccaatatgaaggttctgggtcgacttctattcctggtgcatcggttgcgtctatgttcgaatccatggccgttacgggatctacgatcacgcaggtcgaacttgacaactcaatacttggtttcgctatactttcgacaggaattgttcgtctcaggtcaggattcgtgttcgaggctagggcggctaaagcgcctgttgtagagttgtcatttcggggtattttgaccagcgcgaactggtcgaattgtttggacagatcgtggactaatgaaagattagctcgcattctttcatttttggcttcaaactctccgctgaactggctaactacgagctgagagtcactgaaggctttgatgtgcctggctccaatacgtttcgcaaggcaaagtcctgccagaagtgcttcgtactctacttcgttgttcgatgctttgaattggactcgaagtgactgttctaggatatccccggttggtgattggagtaaaattccaagatcagaacctggtaatgatgattagccatctgcgtaaagtatccaattctcgtctgggacctcgtcgatcacatccggatatagctcggtcataatatcttctaggacctgcgacttgaggctagagcgatatcggtactccacggcgtactcgcttagctcgatggcccatatcgtgattcgcctggattgatttggactgtgaagtacttttcgaagtggttgatcggtgaaaaccactatggaatgcgactgaaagtaaggccaaagctttcgagcggccgttattactgccaatgttagcttttccaaggtcggatatctagtctcggcgtcattcagggccttattggtgtagaagataggtttctcattcccacggtcatatctcaccaataccccactcaccgccaaacttgacaccgagacttagagatatagggtttctccgactttgggtttggctaagatcgccccactcatgaggtaggatttgagctcttggaaagcggattcacacttatcgtccaaatgaaaatccttgttgccacgtagaagtttgtaaaagggaagacatataaccatcgatcgggcgatgaagcgatttaaggctgcgatacgacctgtcaagctctatacctccctcttgttctgaggggatggcaatccgattattgcgtcgatctgctttgggttagcttcgattcctcgttcggtgactatgtatcctaagaattcgcctgatgtcactccgaacgtgcacttagtaggatttagcttcatccggtacttgtcgaggatatcgaagcacacggtgaggtgcttgatatgatcttcggctcgtaaagatttcaccagcatatcatcgatgtagacttccatcgtgaccccaagcagtttggcgaacatctcgtagactagtcgttggtaagtcgccccaacgttctttaaccaaagggcatgactatgtagcaatagattctgcgatccgtgatgaaggccgtcttttcacggtcgtctttatgcatcaggatctggttgtatcctgagaaggcgtccatgaaggacaaaagctgatttcctgctgtcgcctcgactaggcgatctatgtgtggcagaggataactgtcttttatcgatattcacttggatgatcttgcagcgcggtgcctttattgatttgcgagccaatcgttcataaggcgtagctcgctctttgtcctctaattgcgataagatctccctccttcgctgcttcttttcgatgatgtagcatgtccgggagaccttttggttgtcgtacagagtgaagatccccgtcgttatcgggaacttcagacaaaggtggtatgtcgagggaatcgccttcatcgaatagatccaggggctccccaagatagcattatagattggttcagagtcaatgaggacaaacttagtcttttgtgtgataccgcccacttggaactggagcttgatctctcctatcgacatcttcgcctctccatcatatcctgtcagagggcgaaccttgggagttatcttcctttcggagatccccatcttcaagagagacttcatgaacattaagttgaccgaactaccagtgtcgatcaaaacccattatacgtcgaagtcctccattaccagttcgacgactagtgcattattgtgaggatgctgaataccattcgcatctttcgaagtaaaaatgatgggttcctgacttaatggttcggcttcaggggcggttctaacgctacatacttgccaagctcttttcttcaaggctgagaccgaatcttcgtcgtcgaataatctggccataatcatggaaattcttccacgaggatggtttggagctcgttggggttactgtcccctccatctttttggggggcggggggtttgttctccggaatcctagcctcttccgtgtgatcttcttctttgttcggttgatgctctaacaagtattgccccacattcgccggtttgccttgagcctgtttgaaatcgtccttgcgtttattcttcccattcttaggatagtagaccgcctctatttctccagacttgtactttccgaggaggatgttcagaagatgtttgcactcttccgtggaatgtcctccgaactgatgaaaacgaaagtatgaattcttcgagttctttggtttccctggctgttgaggttgatcgtccgagtctattgcgccaaaaaccattcctcgtttattcgcttgtgggtcatagtgttgacgcggctccttgtagacctcccgtgctttttccttggctttgggtggttgggacttccctgccagcttggcgtcttcctcttcaaggaaggcgtatcgtgatgctgtatgtagagcgtcatcaagatctagcggttctctaatcgccaaatatttcctcagttgggacccttggaacagtcacttcctgaaagcggtcatcgcagcttcatccgtgatggtgactttggagagtatttccttgaatcaacctagataggcgttcaatggttcgccgttttcttgattcatactccaaaggtcagagctagaagctcctggtggaatgaacactcggtattgctttaagcaagcagttgacaattgggtgaagttgtcaatcgagttcgcctcaaatctggagaagcaggttaaagcgtttccaacgaggcctttggcgaagagctggcaacaaccgacatctctcttctcgtccgagaagtgagctttggcgactgtgatcatgaaggaggtcatgtattgcttgggatcgctttcgccctcgtaaattggaattcagagcttcacttgaggaatccgtgtgtgtgtaacccgattagtgaaaggagtcttttgggtttcttcgatcattcgctcgatttccggggccgaactgacacccttatggacttgggatccgatctctctgagctttaggtagatatcgtctatctgtccatcatgatctaaagttgggggcctggagatatgaccagatgccattgggtgagacataggcggtctgccgtcttggttggcgggatgaagcgaccctgggaacctggagttgaccctgttggattgtgcatccgtgaggtcgaagctaagaccgcgtggttgaatcattcttggcggtgttacttcagagttcggacgttgggagatcccttttgctaactcgtcgagccgacggtttgtctctgtgacaaagttggacaggtccttggtcacagttgtgagaatggctttgaggtcttccaaggagaaaggtggtggaatgatggcaggggcgataggattcgcctcccgagttgactgatcgtcaaccgttttcacggctaactctagagagctggaattagatgggagcaaaattaatgaacctaaggttcaattaaagcatgtgatgcctattggctcaaaagataactatcccaaaagataaagaaaatacgagaagtaaatgaaaactttcttcaagaagaaccaagtcctcgtgacgatagagaaaactatgagatttccattaacaatccccatgatggaatcatatgaggtagaaatgatattgatgatgaaaatgaaatattctcattttctttatctaaagagatagatatgagaatgatgatctagatccaaagacattacccgagtgccagaaaaggcgaaattgggagaaatagaaaaatgccttgcaagttgaattgaactcccttaataaaagaaacctattgtcacttcatttgagaatgtaaaacatgttgggcacaagtgggtatttgtgcgaaacaaaattaagagagctgagatcaaacgatattaagcccgacttgttgcccaaggtttctctcaaaggccatgagttgaatatgaagaaacatattctccggtcatggatgcaattacattcaagtacttaatgagcctttcggcatctaataatttagatatatactttatggatgtagtgacaacttatttatatggatctcttgataatgatatatatatatatatatataagaaaatcctgaaaggattaaaagttatagaggcattaaacacatcaaagtctaaagatatatatgtggtcaaattacagcgatcactttacggattgaaacaatccggatgcatgtgatataatcgtttaagcgattatctatttaaataagtgtatgtgaacaatgaaatctgcccttgcatcttcattaagaaatcccctttaggatttctgagcattgctgtttatgttgatgacctaaatataattggaactccaaaggagattgatggtgcacgaactcatatgaaagaagagttcgaaaacgaaaaatcttgaaaagacaaaattttgtctcggactccaaattgagcatttcgaagatggtatatttgtacattgataacactgtattttactcattttaggtgtatgtttatcatcatttagctatgcatttgctcattgtatcatatcattttacaccattttagattattttgcatacttaggcatctaggatcatcttgcatacgcattgcatgtttggtgtgttttcaggtgcagaaggagctaaaaaggactctactcgatccattcactcgatccaggcagctaccgaggaggctgcagtttactcgaccctcttactcgatcaaggcagcctcagatgaagcagtagattgatctactcgcccctcctactcgatcctctactcgacccatttactcgaccaagggtgaccaactctacaagacttgttgagctatcaaagcgtcttcggatcctcctcattccccactcaactagacatctgagcatacagataggagaggaagaagcatctactcgaccaattgatcactcggagcattgatacaaaggcgcagactttgcagcaccctccttactcgatccccaagatcgagcatccgcccaaaccgcctcaagtctcttgtcttctaatgaatctagggtttcaacattttactataaatagatccctttggggtttgtccaaaggatcaagcttttttctttcagtttttctttgttttcttgaatcttcaaaccttaattactcttaatgtatttcgtttttgcacttagttgttttagtaaagttgtttagcttgtttagacctatattttggtatgatttcagtaatttctgggtttgtgttcttgagaatgttgcttgagtagtgattagggttcttgaggatggattagattagggtaatctctaggttagttaggtggttaagattaggttagaacccttctagattcgcttggcccctatgcggttttcgctggctaatgtggagattcgatgatagacatccagcgtccaaaagacgttcaaatggatgtctgatctacgaattccagagatttgtagactcgaccaagacattggcttgtctgcttattggctttggtagattgtttcttaaaccctgctctactatgtttcatcaatgatagttgagattaggaagtggtagagttatggaggtctctgtcacgacagtggattgacccggtttttgaatctatcgtcatgagtatctacctttcacctattagccatctgatgaaccttagagttgtccttatcaatgaatctatccttaggacttctattagatttatttgtatcccctgttgattgcacttttattttacatgttatttgtatcccctatttgtatcccctgttgattgcattttagttctgcctgttggttctactcgatccaatgatcgagtagggctctaagttctcatttttacttctttgaatcctgacctaggattgttactagaaacccatcatcattataatctggcttgacttagttacttctgtacacgtcttgattgctagcaataacagtggactggattgacaccccctatagatgcatcgacatgttagtgtttgtaggggaattgatctgaacctcacacccttcagcaaataagtaggcctgaaaaacctacttatcatgcatcaatccaattaaacaaaaaggattttaaagcgctttaatatggataaaacgaatcctttaagtattccaatggtcaatagatctttaaatcttgaaaatgatccatttagactttgtgaggataacaaagaatttcttggtcccgaaataccttatattagtgctatcggtggacttatgtatcttgcaaattgtactagaccatatattgcttttgctattaatttgcttgcaaggtacaattcatccccagatatgtctttaccattggaggaactgcaatctcgtggcgttctcaatagcagactatagtcgccacttcatcaaactaagtggaaataattgctcttcattaagcatgtagagaatgtgtttggcttagatccatgactaaccatgttcaagaagcaagtagattagtcattaaaagagagccaacaacaatatatgaagataatgatgcatgtgttgctcaaatcaaagaaggatatatcaagagtgacataacaaagcatatcccttcattattcttctcctacactcaagaactcgagaaaaacaaagaagtcgacgttcaatacatttgttcaagttacaatgcagcagatttatttacaaaggcgtttccaacctccacatttagaaaccatgttaaaagtattgggcgtcatttacgagacctgtgaagtcttttcgaggaggagttcacgtcactatactctttttttcttgtcatggtttttatcccagtgattttttaatgataaggtttttaacgagataatacataactcatcaaaagtaatggataatcacggggtagtgttaagaatggataatgattatccatttactttatttataacttatcttttactttcttgctaagttacttgagctctaagttctatccattatttacttagtatgtacgaagcttattcattaagttttgttctcctatatatagttgtgttcgttgatgagaaatgaatgagaagaagaagtctttgataatctctctgctgttactctctcttctgatatttttttaacacaatctacatatacatttttataaccactttgtgaaataaatcctggagttgagacttatttacagtggctgccactggcatttaattaattgtttcaatttttggcaagattttctctaaccagctccatactttcgaaactttcaaagatttgggccatttgattttaatatgtgttgtgatttccatatcactcttttgggccaaatggtacaccgctattgggcttaaaaataaaatttcccaacgactaaattatttacggctacgaacacatatttcaaacggatcaagcatattaaatactaacgtgtatagcacatttgttgaatcccttaaaatgtgcaaaatattccttcgctattcaatcaaacaaaaaaactatatgtagatcccttcaaatgagcaaacgcaccacaaaaacattcctaatctattcactaaatcttaactattccaaatttgaactagagtttctgaaattatataaaacaaaatatgcaagaagaaatcggtggtatcgtaaaatcccttaaaatgagctaatcacatctaaatacatttcatatcttcctttaaataatcctacgaattaacacaccattgttataaactagataagtatggatgtgattatccatcactcatctctatccataagatatggatgatgcttatctctatccattacttcctctctaagatttggatgatgtttatccattacgtcctccctaaaatatgggtgatgtttatctattacttcatctctaagatatggatgatgtttatccattaattcctccctaagatatagataatgtttatccattatttcttcgctaagtaatttactttctaattaagtaaactctactatatatagttcatttcattcatttgtaagttacagaggaaagagaaaagaaagagaaagcaatcaaaaaactcttgtttcgagttttactctctctagtcctcattcttttttcttattttaatcttttataacacgttatcagcactatcgtctttctgggtgattgtctaaccgaccgatcgtctatttgatcaagcatcttttgaggtaacatttaaattatgttaaatttattttaattcatttttaataaattatatgcttgatattttcggggtatgagattataccttctccttaattgaatggttggctatgcctcttcgaaatagcataaatggctcattaattgaatgattatttatttatatagataatcatggcaaatctagctaagcttgatgttgttgcccttgatgtatctggcaaaaattttatgacatgggcatcagatgctaagatgcatctaagatcaaatgggctttttagcaccatagatgcatttgaaacgacatcagatgagagcaaagctaaagccatggtatttctacaccaccatctgcacgacaatttaaaaaataaatacatcacgagagaagatcctgtggatctattgcaatcacttaaagatcgtttcgatcataaaaatatgtgattttgcctaaagccagacatgaatggctaaatctccggtttttggattacagaagtgttggtgattataattccgccatattcggaatcacctccaggatgatattatgtgctgaaaaagtgagcgattatgatatgattgaaaaaacgctctccacctttcatcctagaaatgtaatctttcaacagcaatatcgggccaaaggatacactcgttattccgagttgatgcaagtccttttggttgctgaacaaaataatgaactcgtgatgatgaatcatttatctcgcccacctggatcagctacacttttagaagtgaatgttgctacatccggtgatgataattggcgaggacccagaccttgtctagaccgtggtcgtggtcgaggaaaaggaagaagtttccatcccaatgatatcaacacggaaaaaaccaacaaaaatcttcatgtgaatgatgttggccgtgttaaaaaagacatgttgaaatcacttgccacagatacggcatgaaaggatacttgtaccagacgtgtcatataccaaaacatagccgatctgtatcaagcctcacaaaaggcaaaagaaagggatgttgaaactaatctcatctgtgatgaggcggaactttcctttaaaggccaagatgatgataatcatcttgatatgacagattttctcgattgatcatgacaatggaaaatcaatgtaatatgttatagccatatgtataatcatgctatgcatgacaagcattatagatgcttttgtaattctggaataatgacaaatggatagcctatgtcaaagttttataaataaatatatttattccagaaaatattttatgacatatggatagcctatgtcaaaatacgcgattgaggatgaaaatatatgtctggcggacagtgcttctacacactatctttaaagataaaagtacttctcctctctcgaaataaatgactccgctagaagcgtgagtactataaatggccatgcaaagataatattaggctttggcaaagtcaattttacaatgccaaggggatctcattttaaagtaaatgatgcattatactcccctaaatctcatagaaacttgataagtttcaaagatatccaaagtaatggatatcatatagagactatgaataaagatggcattgaatatctttgcataaaatccgagaggcaatatatattaagaattgccaatgctatcctgcagattatattgcacaaaaataaatataatcgcatcagatgttaatgtaaactcgagtgacaatcactcgtgtgagtttactagtacatttaagatatgacatgaaagacttggacatcctggttaagtcatgatgcgaaaaattatgcaaaattctaatgaccatccattgaaaaaccagaaaatatttaaatctggtgagttttcatgtaaagcatgttctcaaggaaaactcagaataagtccatcaccaaacaaaattgggaatgaaagacctgaattcttgtcgagaattcatggtgatatatgtgggccaatccacccaccgtgcgggccaattcgatatttgatggtattaattgacgcatctactagatggtcacatgtatgtcttttgactacacgaaaaacggctttcgcaaaattcatttcccaaataatcaggttaaagacacaattttctgataatgccataaagaaagtcaggcttgataatgctggggaatttacttcacaaacctttaatgactattgtgtatcgatgggattcgatgtaaaccatctggtccctcatgttcatacacaaaatggcatggccgaaccattaattaaacggttgcaactcattgcaagaccgttaatattgagaacaaaactcccaatttctatatggggtcatgctatattgcatgatgcggctttggttcagattagaccaaacgcagataatgaatattcccctttacaaatgacttatggtcaaataccaaatttatcccatcttcgccttttttgatgtgcggtatatgtgcctatagcaccgccacaaagaacaaaaatggggccccaaaggagattgtgaatatacgtcggttatgtatcaccgagtataataagatatcttgaaccacaaactggtgatttgtttacgggacgttttgccaattgctattataatgaagatgaattcccagctttaggggaaggaattcataaaatgcatatgcataaagatatagaatggtgcgcaccatctttaaaatattttgatctccccacaaagcaacgtgagttggaagtagaaaatattgtacatttacaaaatatggcaaatcaattaccagattcgttcatcgatacaagaaaggtgacaaagtcatatatccccgctgcaaataccccatcaagagttaaaattcctaatgaactggaattagatgggagcaaaattaatgaacataaggttcaattaaagcgtgagaggcatattggcttaaaagataaaaatcctcaaaagaaattgcaagaagaaaataaaaaggttcttcaagaagaaccaagtcctcgggacgatagagaaaatcatgagatttccattaattatgcccatgatggtatcatatgggataaagatgatattgatgataaaaatagaatattctccttttctttatctaaagagatcgatcaagagaatgatgatctagatccaaagacattatccgagtgtcagaaaaggccagattgggagagatggaaaaatgccatgcaagctgagttgcactccgttaataaaagaaatgtctttggacctattgtcactgcatctgatagtgtaaaacctgttggatacaagtgggtattcgtgcgaaaaagaaataataaaagatgagatcacacgatataaaacatgacttgttgcacaaggtttctctcaaagaccaggagttgattatgaagaaacatattctccggtcatggatgcaattacatttaggtacttaatgagcctttcggcatctaataatttagatatgtaccttatggatgtagtgacagcttatttatatggatctcttgataatgatatatatatatatgaaaatcccggaaggattaaaacttcccgaggcattagacacatcaatgtctaaagatatatatttgtcaaattacagcgatcactttacagattgaaacaatccaaatgcatgtggtataattgtttaataaattatctacttaagaaagggtatgtgaataatgaaatctgcccttccgtcttcattaagaaatcccctttgagatttgtgatcattgctgtttatgttgatgacctaaatataattggaactccataggagattgatggtgcacgaactcatatgaaagaaaagttcgaaacaaaagatcttggaaagacaaaattttgtcttgggctccaaattgagtggtaagtgtgtattttgcatgttttgagcatccatctctcatcactttagcatcatatcatcactgttttataccatttcacatcatttgtcatcactttgcatgtttaggatagttttgcatgcatgttgcatatttgtgttgtttttaggtgatttggagctgttgacgagctaactggaagaagcggacctgatcatgataaaccactcgacccagaggtcgagtaggagcttcaagatctcaagagaccactcgacccccaggtcgagtagaagacatcaccacttcacctcaccactcgaccaccaggtcgagtgtcttcatctccatctcctgaccaccactcgatcacatcactcgaccccgaggtcgagtgtcttcatcccattgtcagaccactactcgacctcatcactctacctggaagtcgagtatcaccatcaccaccactcgagtgcatactcgatgacaagcttcagagccttcttcattccgcactcaactagacactcgagcacaaggaagaaaagaagactccagctattcactcgacatcccactcgaccccatgggtcgagtacagttcttaatccgtcccaatacttcatcgttttgagtattagggtttcggaatatttggctataagtagcatgtactccatattttcgcaaacaagttttttatctagttttattccgcagactttgtgttctagaccttttgtaatccgaatttgtctttatctattcagtattcaatattcagcttttgttcttgatttcgtttaccgttgttcattctgttatcatcctgctgttacactgttgttatcatgttttcaacttgttcaacgtttatgctttctattatgatgtctgagtagtgaataggtttctgaggatgggttagagtagtgtcgaattctcagtatgctaggtgattgagtattgattgatagatcccttctggattagttgttcttaatgcctattgctttctgatcaactggaatttgagcccagacatttccgcgcccaaaaggtgttcgatgaaatgtcttaaccactaattccagagattcgtgaccctgtaccaaggtattggttgcagggagagttttggctttaacttgttgattcgtaatgcctgttaggttagctgtcgtcaatggtgattgagtctgggactagattaacttgagagtctctgttgcggtggcacttagatttggttaatgaacttgttgtctagggttaatttattgagcatgttaatcacctgtaaactgaggaaacgaaactactcaattaccccatcctcgggaattctttatctgattgattttattgtttactctactgctgtttattgcatcttgtcatctgttgcttagtttctggaattctttactgttactcgacctgatactcgaccacccagttgtctggcaacagactgtgcagtcgagtacctatgttttattttctgtctgttactcgacctgccactcgacctcacccagtgctctacaaagagctgtggtggtcgagtgttttactgtttctgtttgattttctgttttctgcatgttcacttaggactgctaaaacacactaaaacctgttattgcttggcttgacttagtgacttctgatcacattttgattgttagcatcacacccatttggattgacaacctaaaatactacaacgacatgatagtgctttaggtttaattgattaaaaacctattatcattgagcatttccaagatggtatatttgtgcatcaattcaattatacaaaaaggattttaaagcgctttaatatggataaagcgaatcctttatgtactccaatggtcaattgataagtgtgtattttgcatgttttgaacatccatttgtcatcactttagcatcatatcatcactgttttataccatttctcatcatttgtcatcactttgcatgtttaggatagcgtttgaatgcatgttgcatatttgtgttgatttcaggtgatttggagttgttgacgagctaactggaagaagcggacctgatcatgtcaaaccactcgaccacaaggtcgagtagaagcttcaagacctcaacagaccactcgaccccctggtcgagtaggggacttcacaatttcatctcatcactcgaccccctggtcgagtgtattcacctccaccacctgaccgtcactcgatcacatcattcgacctcgaggtcgagtgtcttcacctccaccacctgaccatcactcgatcacgtcactctatctggaagtcgagtatcttcatcaccactagtcgactacatactcgatggcaagcttcagagtctccattccgcactcaaccagacactcgagcacaaggaagaaaagaagactccatctcatcactcgacctctcactcgaccacatgggtcgaatacagttcttaatccgtcccaatattgcgtcgttttgagtattagggtttcagaatattttgctataagtagcatgtactttacattttcgagaacaagtttttatctagttttattccgcagacactatgttctagaccttttgtaatccggatttctctttatctattcagtattcagtatttgttcttgatttcgtttacagttgttcatcctgttatcattttgctattactctgttgttatcatgttttcaatccattcaacgtttatgctttctgcaatgatgtctcaatagtgaataggttttctgaggatgggttagagtagttgttcttaatgcctattgctttttgatcaaccggaatttgagcacagacatttccgcgcccaaaaggtgttcgatgaaatgtgtgaaccactaattccagagattcatgaccttgtaccaaggtattggttgcagggagcgttttggctttaacttgttgattcgtaatgcctgttaggttagctctcgtcaatggtgattgagtctgggactaggttaacttgagggtctctgttgcggtggcatttagatttggttaatgaacttgttgtctagggataatttattgagcatgtcaatcacctgtaaactgaggaaacgaaactactcagttaccccatcttcgggaattctttatctgattgattttattgtttactctactgctgtttactacatcttgtcatctgttgcttagtctctgcaattctttccttttactcgacctgatactcgaccaccctgttgtttagcaacagactgtgcagtcgagtgtctctgtttcgtttagtgactgttactcgaccaagtcactcgaccacacctactgttctgtaacgagctgtgttggtcgagtgcttttattattctgcttgaatttctgttttctgcatgttcacttaggactgctagaacacaccaaaaccagttattgcttggcttgacttagttacttctgatcacatcttgattgttagcatcacacccatttggattgacaaccttaagtactacaacgacatgatagtgctttaggattaattgatcttaaaaacctattatcaatttggcgtcgttgccggggagaatcatgagtaattacagtggcagttctttagttgattctcactacaacatggatgagacagagtcgtcatcttcaaggccagagagagaacagagagaatatgacagctttagaagaaaagctgagatagctcgagggaagagagtgatgacatagaggtatgagcttatagatgaggatctggaagacgagtacatgcttgagcatactcgcagagccaccaaatttctgcacaaagccgatgtattgcttgctgaggaatatattaggctcttcaaactgaatgagttctgtagcacgaggtatccttgctcgaccacacttgcacaactcgaattattggaggatgttcagcacctgtaccaaagttgtcatctggacactctgatggcttatccgtatgtagcatatgaagaagagacaattaaattcctctctacgctgcaagtggagctttatcaaggtatgacttctgatgagttggattgtgaaggattgggattcttgagattctttgtgtatggtcatgggtataggttatcaatcaagcgcttggaaggattgtttggtttccccagtggaacgagaactaagcccaagtatgatagagaagagttgaaagatttatggatcaccattggcagctctgcaccgctgaactcttctaggtcaaagagcaatcagatacgtagccctgtcatcaggtacttccagcgttctatagccaatgtactctactcacgagagatcacagtgactgttactaattctgatatggagatgatcgctatggctctcaagggaactcttcgccaaactaagaacgtcatgtctctccaaggtgaaatcaatgacacacctctctctgtacttcttctgatccatctgtgtgcatacaagaactaggttgtcagcaataaccacaagagagcacgaggcgctctgtgtataagtggtgttgtgacaccgattctgatagcttgcggagtcacaatcacatctgatggactcgagacacgggcaatggatatcgagcatctacgtcactgcaaattcctggagttcgcaatggttggcgacttgcaccggttcaggtttgagcactctacaaataagagagctagcatacttctccctagccctgaggttacacggataatagagggagataacattgattttcggcctgagattggacgcctctactatgagaacgctccgccattggatgaggatgatcttctagaagaggctgctgaggatgggatggatgaagaacgagcagtggagttcgacactagcatgtatccctttggtgaacatgtacctcgagcgagggagagcaagagcttgagtgaagctcataggaacaacagtaaactacaaaagtggtgcaagaagcaggagaagctgctcgccaagtgtttcaagactatcaagttattgaaagataagctgagttgttcctcctccactactgctattccatagggtcagcctcctctagagatgccatcgaggagatttgatgagcctgagcacaggcctgagcttagtgagcagagggtctcacatgtccaggctaggcattcgtcattcgagtcccgggagcacaagagaaggaggaaggctacactcactcgatctagcaacagatcacgcataattcactcgaggagatcactcgaccgtggtactggccgcagcagaagaagggaggtcgagtatcctcagagcggtgctggccgccatagagttgataaggtcgagtacccacctgctggagctgatacggaacaaggcggttcgtctatggcctgggagcaatcacaggcagccattaacgaccaattttgttcattctttgactgaggtaagcgcctcacttcaccattgtattatatcatctgttgtgatttgttcttcattttgtttctgtgattgatttgtcctgagtactctcttccaagtttattcacacagtggactatgtgatttaagtttgggggagggcttaggaagtgtgtgttgcattgtgtatatttttgagtctgcattcatctaaggcatagaaaaacaaaaaaaattttgaaaaatttcagaaaatgatttaaaaaaaactagtgttcatgtagttgcattacatttagaatcgagtctagagtgtttcatttaggattgttgcatgtgcataggagataatgatgagatagccttgtaagcattttggttcatcggataaactcagtgccctcgttgctagttgtctgttgcatagtcaatgaatttgaaataaaactgaatcatgcctagattgctctactcgaccacactgtcatgatctgataccattccctatcaatttgaacctaaatctgatctttaattatcatgtctgcatcaaatttgaactcatggataccctaaaatatttggattttcttattcattttgatcactcttgttaatccaagtagctgattctccttattagagcagttaactcgaacccaaacctagactttctttcaagccctatatcacttgtgagtgtttgtgaggtcttattccaattaagcttggtagaaagtgttaggttcgtaacgatagagaaaatgtctcatatagttctagttcgcattttttggagtagataggactaggtgagcgcttatactttgggttgggatgtgtttaaaaaacaaaatgggttgattcattgatgagaaaaggtaaaagactttaggtgaagtaagttaaagaagcagaaaaagtctagtaaaggttttgggatttgtaaagaaaagaaagagttcttgttagctattgaagatgggcaaaagccctcggttataaaatgttaaaaacaagaaccttagttgttaaagaaatccaaatccgctagatgtatcaaagtgttgagaaagcttctcctagagttaagagaaaagaaaagaatgattaggaaaagggcttaaaagattcatgaatgcaaagggtagtgttaagttcttatattgggattggagatgggattaccattagagcttcatttgatatactctaggtagatgggatcttatctctgtatgcatagcttgggacttacctttagcattctactaaagcttaatcattttttgagagatcctctgttactgaagcctattctgtaagggaccatctttgtctcttgaccttttaccttaggcaaatgagttcattgatgatgcattgcttgattcacgttccagaactaatgaatgttaaagggattgatagatttgaaaacatgtgtaggtcgagcatatgagtcggattgattgataataaggcatggctaatgtttttgagtaggattcgatcatattgcagcttagaactttcaacttggacattgatttcatcttgtttatttggtgctttggctctgagtccccactttcaaacttcacctccagcttgttcttaattgtttgcttgagggcaagcaaatactaagtttgggagagttgataagtgtgtattttgcatgttttgaacatccatttgtcatcattttagcatcatatcatcactgttttataccatttctcatcatttgtcatcactttgcatgtttaggatatgtttgcatgcatgttgcatatatgtgttgatttcatgtgatttggagctgttgacgagctaactggaagaagcggacctgatcatgtcaaaccactcgaccacgaggtcgagtagaagctt

SEQ ID NO: 1473 - DNA, 105463 bp, Arabidopsis thaliana
gaattcttagggatgggatagagtagttgtggaatccgtagtctatagaatggttaagttttagaattgattgaatccctttaggactagttgcgtttactgctaatttctttctgatcaactggaattcgatcccaagcattcccgcacccagaaggtgttcgatggaatgcttgatccactagttcctgagatatgcgtctctatcccaagggattggccgtttagagcgtttattgactttatcagtctgttcgtattgcctgcatagttagatttcgttaatgggaattagtctgggctagctttgcttgaggatttctatcacgggagtgaattggtctgttgttgaacctgttgtctagggatagcttgattgcgcttgttaaccattcgaataggctaggacaccactctactcgattaccccatccttaggaaattctcgtctatcttatttctctgttttatcgttatcgcttaatcgttctcattgcctgtttcttagtttttacaatcactcgaccaacttactcgaccacacccagtgtctggcaacagactgtgcagtcgagtatagctgtttcatatcctgtctattactcgacctgttactcgaccacatcctacttctggcatcagcctgttgtggtcgagtgattttagtaattctgttattgcttctgttttctgcctgttcgcttaggactgttagaaaccccaaaactgttattgcttggcttgacttagtgacttctgatcacatctcatctgtttgcatcacacccatttggattgacacctaaaatactacaacgacatgattggtgttttaggaataattgactaaaaatatattatcaatctccgagttgagagagccaaggagcaggcagagacgagcttccacacgctcgaccggacagaacgagcaacacccttccgcctcaacttcagcctctacctatacccaagagagtatggatgactatgtctacatctacttcacctgatcatagaggtaacaccacctctccattgtatataccatagcatctttttatttttatttttgtgttttgtgctcaggtagttagttctctgttgcataacgattgtatctctgaagtaagactgcaccctgctttgaatttgtaacttgactatactactttgatcaaaactcgcttatctgatgccattccctatctatgagaacctgaactgaatttgaaattatcatgtctatgcattgtttatgaactcatggctaccatatacatacttggatcatcttattcacttcatcaccctctgttaatccaagtagttatctctcatctttagagcagttttccatacccttagcgtagccttatttcaagccaaagatcatttgtgtgtgattgtgaggtctttttcaattgagcttggtataacgtgttaggtatgagccgacaagagcactctttcatgtagacctagcccacgctttttgggttagctaagactaggtggagacttgtatttttgggattgggattgtgtatggaatgaatgggaatgagagtgagaatgaaaaaaaaaagaaaaaaaaaagagagagagtgagagtttagagttctaagggggatacaaaagtattaagtctagtaaagggtttggaattcaaagaagttaggcattgtgattcaaagaaaagggtaaaacgccctatgtgctaagaatacaagaaaagccttaagtttgtcaaagtatagaaccaaacccgctagactcttaaatcgtttcaaagagaaccccttagaacttgaaccaaaaggagaaaaagaatgagaaaaagggtagagttaagacatctatgggaatgagatcatcttatgagctatcatactatatcattgggagatgggagtctgttcttgtatgtgtccattggcttttacctttagcattctactgaagctcaatcttttctctgagagtcctctgtgactcgaccaaaccattagagggaccatttttgtctcttagcctaacctcgaaaccaagtgagttcataaccattgcattgcttgatcaactgtttatgcttaatgaatgttaaagggaattggttgatgtgaatgcttgaatagattaaggcaagttgttaggttgcattgtgacgagtatggctaacgtttttaagtaagggtttatcatcttgtaacctagaattagctacctggacattgcgcttacctattttatatgcatgcttcgcttcttgaatccccaccttcaaacttctccttcaacttaagatttttgtttgcttgagggcaagcaagagataagtttgggagagttgataacactgtattttacccattttaggtgtatgtttatcatcatttagctttgcatttgctcattgtatcatatcattttgcaccattttagcttgttttgcatacttaggcatctaggatcatcttgcattcgcattgcatgttttggtgtgttttcaggtgcaaaaggagcttaaaaggactctactcgatccattcactcgatccaggcagctacagaagaggcatcattctactcgacctctttactcgatccaggatgccacggaggaggctgcagtttactcgaccctcctactcgatcaaggcaacctcagatgaagcagcagattgatctactcgcccctcctactcgatccactactcgatccatttactcgaacagggtgaccacccctacaagacttgttgagctatcaaagcgtcttcggatcctcctcattccccactcatccagacatttgagcatacagataggagaggctgaagcatctactcgaccaattgatcactcggagcatagacacaaaggcgcagactttgcagcaccctctttactcgatccccaaggtcgagtattcgccaaaaccgcctcaagtctcttgtcttctagtaaatctagggtttcaacattttagtataaatatatcactttgggatttgtccaagggatccatgctttatctttcagtttttctttgtgtttatgaatcctgaaactttaattactcttaatctatttcgtttttgcatttgattggttaagtaaagttgtttagcttgtttagatctacattttggtatgattttagtaatttcagggtttgtgttcttgagaatgttgcttgagtagtgattagggttcttgaggattggttagattagggtaatctctaggttagttaggtggttagtgtttaggtttatacccttctggattcctttggcccctatgcggttttcgctcgctaatgtggagattcgatcatagacgtccagcgtccaaaagacgttcaaatggatgtctgacctacgaattccagagatttgtagactcgaccaaggaattggcttgtctgcctattggctttggtagattgtttcttaaaccctgctctgctatgtttcatcaacgagagttgagattaggaagtggtagagttatgggggtctctgtcacgagagtggattgacccggttttaaaatctatcatcatgggtatctacctttcgcctattagccatttgatgaaccctagagttgcccttatcaatgaatccattcttagaacttctattagatttatttgcatcccttttttattgcattttagttcttaattttgtcacatgttggttctactcgacccaatgatcgagtagggctcttaagttcttattcttacttgtttgaatccttccctaggaatgttactagaaacccaccatcattataatctggcttgacttagtagtttctgtacacatcttgattgctaacaatacaatggactggattgacaccccctataactgcatcgacatgtttgtattttaggggaattgaactgaactcacacagcattcagcatataagcagaccaaaaaaaccttcttatcatcttcacagacatgattgaggatatcatggaagttttcatggataatttttcagtttgtcgatcatcatttgaggattgcttagagaatctctatagagtgttagcaagatgtgaggagaaacctttagttttgaattggaagaaaggtcactttatggtgcaggatgggatagttctcggacacaggatttctgagcatgctatagaagttgatagagctaagattgaagttatgacaagtcttcaagcgcttgataatgttaaagcagtgaggagtttccttggccatgttggtttctacatgagattcatcaaattcgagtttacgcaagagtgtcatgatgcatttcaacagataaaacaagccttgatcagcgcaccaattgttcagccaccagattgggatctactttttgaggtaatgtgtgatgcgagtgatttcgtagttggagctgttctaggacatagaaaggataagaaacttcatgccatctactatgcaagtagaactcttgatgatgctcaaagaaattatgcaactacagagaaggagttgttagctgtggtgttcgcgttcgagaaattcagatcttatcttgttggattcaaggttattgttcaaacagatcatcatgctgccttgaagtaattgatgcaaaagaaggatgctaagccaagacttttgagatggattttgcttcttcagaaatttgacatcgaggttagagataagaaaggagttgagaatggtgtagcagatcatttatcacgcattatgatcgatgatgatgtccctataaacgatttcttgcctgaaaagaacatatacatgattgatacagctgaagaagatgactacaaacgtgataggttgcagaatcgagcttcagtgtcgattgacactcccattatgtcgatcgacactcacatttcagaggaagtaaacattcgaagttgtgcgatggtgtcgatcgacaccactgcacctgtcgatcgacacccttctaaatcgacaagaaattggtcaccaattgagaattgcgctgtcacaacggtcgagaaggactatccatggtatgctaacagtgttaactacctagttatagatgtggaacctgataatttcacagattacaacaagaagagattcctaagagagattaggcgatattattgggatgaaccttatctctataagcattgttctgatggagtttataggagatgcattgctgcaacagaggtaccggatatactatcagattgtcaaagctctagctatggtggtcattttgcaacctttaaaacagtatccaacgttcttcaagcaggtttttggtggcctacaatgtttcgggatgctcagaagttcatatcgcaatgtgacccttgttagagaaggggaaagatcagcaagcgtaatgagatgcctcataaatttatcctcgaagtcgaagtcttcgattgttggggtatagatttcatgggacccttcccaccttccaacaagaatctctacatcctagtcgttgtggattatgtctctaaatgggtagaagctataactagtccgaagaacgattcagtagttgtcatgaaactcttcaagtctatcatcttccctcattttggagtgccacgcattgtcattagtgacggaggtaaccatttcattaacaagattcttgcaaaattgcttttacaatatggagttcagcatcgggttgctactccctaccacacacaaacgagcggccaagttgaagttttcaacaggcaaatcaaagagattcttgagaaaacaatgggtaaagcggaaaaagaatggtcctactagttagatgatgcactgtgggcttacatgacaactttcaaaactccgcttcggaccacactttttcatcttctatatggtaaaacttgtcatcttctagtggaattagagcactaagcagcttgggcagtcaagataatgaatttcgacatcaaatcagcgggagaaaggagacttattcagttgaatgagcttgatgaaatacgaattcatgcctatgacaactcgaagctctacaaggaacgcacaaaagcttaccacgacaagaagatcctcactcggacctttgagcctaatgaccaggtacttctttatgatcctagattgacaatatttcctggaaaattgtcttcccgttggtcagatctctacacagtccactcggttaggccatatggaacagtcattctcaaaaacaagaatgaaaaaccatttgctgtgaatggacagagagtcaaacactactcggctgaaggccagattccagtagaaaagcctttggatcttcaggacccacctgttgattaaacaactgcagaatcaagctattgactataaactagcgcttagtgggaggcaacccactagtcagtacttctcctttttattcatttcattcatttgattcttaacttacgatttttgattttataggactttttgttcagataaaaaaaaaacaaacgcaatggtgtcgatcgacaccctcattttccaggtaagtcgttttaacctaaaacttcatcttcttcattaaattttttttccaaatcgccgaaatcactaaaatctctctagatcctacgattcttcaccgtttcttgtgattttaggctctaaactcattagaatttcatcctctatcttccccaagtttcaattccatcgatctacaagatgactcggcagaaaaagaaggcgaggaagaacgttggaccatcctcctcctccgccgctgctcgcgaccgccggagcttctccaccgtcgctggtctccgcccctcccagctgcagcccctcaacctcctgtttatcgatttccatggccaaaggttccaacaaagagaattccttctcaaagggtttgaaagaaagatgtcaacagggaattcactaaaggtgactatattaatcgccctttttctccaaattgggatgaatatgatgttctataatgcctgaatgagtgtagaaattttgcctactcggtttgcggatttaagattgatgcagcgtttgtagatagagaaatctgttttaggaatgctagatgacataggtttgggaaccatctgttgtaggcattacgatttgtaccctgagctggtttgacaattcatggcttctgttaaggtttactatgtgaatggcaggaaacaaaacgcttaggaaggagctcttatcttcttcattcgcggtgtcagatacagtctaccaatgagagttttatgtgacatctatgactttgacaatgatctcactagagtttccctgcctggtcaatttaaagattatcagattttcaggagcaggtttggtaatggaatttatgattccaacgatgcagtacactctgttctgtcaccctgttctgcgatatttggttaggctgattagtagcacactattgtgcaagatgaagcctgacaagatgagattttctgagttgttgttgctctatcatgctcttcatgacttctttccacacagccttggatttgagcaggttgaccgtaatgtcaaatttggtgatgtgttcgctcatcacttggtcttgctcaagaccaagccctttacaggtaaaggacagtaatcagagagagttggcagccttctcactcctatattcgagcatttccgcatcagctttgagggcgaagaagtcaacaccacgcggtcactatggatgagacttacctgaagaactctcacttgcttaaaggcaacttactttggtgcttcagagacgatacagggcagcatatgattcagttacctccccctgcacttacaaagattacaggagagcatgaggagataggctttcatcccgatccttctcttctgcatgtcgcaccatgcaccaggcgacagaggggttaagcttcaggatgtgcacctacatagaccgaagacgagttcattgaccttgctgggggtccaagagttggatcttcctcgtccgctcttccatatcagctgccttctcctccacccatcccgatggagccacaggtctttgagcagtacgtcgtcgacagtttcaagagcgtctggaacgacatagctacactttctcgctgcggttgtgttgctctcactcgtcgtcgtcgtcgctctcccgcacccacctctggctccgagcatgaggactagccatcctccttaccttgctttgttttctgactttgtttttgctttattttagactattggttatttgtttttaaacttgttgcacttattttcctatgctttgttggaactattgatgtgtgttttagtgatttaactgtctaactggaggatccatgtgaaaacactaaccaaggctctacaacaatgacctgaatttgcaaagctaagcaaaacgaccagagtgtcgatcgacaccactctcaggtggcaactcacgtttctctaacttttaacttctgattatttttctttcgattcctctatcttaataactctagggacagtgttatctaagtctggggagtcagttactaacttcatcttttcttttcttatgagtcagttgtgtcattttaaattagatagttgttatattaagtcaaaacttttgtcagaaattatgatctatctctctagtttattccctggattgctgaagtactgtagatgtaaatcaatccgactaatggaaaatccagaaagccaatcaacaaacttaaggatatccattcctaacataatccacaaaggctggagctaatttcactgctcttccttttacctcatcaaaacggttagtgttaatgggacttgtctccttgttcatacctgataagtcgactactgtgataaaaagaaagtgttcctctcccaaataaaaacaaaaattaaaataataagaaaataaataatgagagattgagaagactttcagatagtgtataggggtaagaatgtttcctatgacctcattattatacattatttgaaacgatcaattacaaaggttggaaaaatgccaagggtgtcgatccactatgcgagttcccttttgtttactctctaaaaagaataagtctggggaaagaaagaacaccaaagaaaaatatatacaaagaatggtcgatttatcatggaatagtacatgaatgagtctagaaggttcttaagcatttacttgtttgatgagacccaacgatgatagcctagtggatatagttgagtgctttggtatggaatctaggatgttgtgtgggctagcggagaattacatggtgatcagaatttgattagaactgtttagtgcatagatttggtttgtatgatcaaggtaataagctagacagattgagagtttcttgtttttaaacctctttcacagattcaaccttttgttttgcttgagggcaagcaaaagctaagtctggggagttgatatgtcctggtttttactgatttctaacttagtttcagaatggtttttagagtctttctagtcttttcgtatgttttgagtcatttcaggtacacttacacatatgggagctatggggcacaatacggaatttatgaagcttttcagcaataaagatcttgaaggacgtttttcagaaggcgtcgatcgacacttttctatttttttcagatctttacatgtttgggatgcatttggagattatggaacattcaggagcaaaacagacaacttaagctgcgacagcaattcggagacggaaatcgacgtatgcatctcttcattatatactcttgtgagtatgcatcctttccatggtctttcacaagagcatcctatggatcatattgagcggtttgaagacttaatttcgagcattaaggtagagggtgtttcttatgactatcttccctacaagatctttccatattctcttgttggggaagcatctttttggcttaagcagttgaagcctggatctctaacaacttggaaagaaataaaggttgcttttctcaacaacttttataatgatgcaaggtccgaggagctgagaatgaagatttctaccttctctcaagaagcagctaaagcatttaaaattgcttggatcaggttccgaggatatcagagagattgcccgcatcatggttttagtgaggttcagaggagttgattggcattatcagatggctttggatgcagctagtaatgggaatttcatgtgaagatatccagaagatgcaacaattttgattgatagcttagcttccagcattagtaccaaaagcgttgacattgcaaggaaaacgcaagttcaatatgttgcacaggttgacagtttagccacttcagagaagatggatcaacagagatacatgagtttcaatcaacaatctacacatcaaaaactggctcaggaaactacaagcttcattcagaatcatgcttcttctacccaagcccaccctccacccgacaccactaggacgattcaatctatgctcgaacagattctcaaaggtcaagagaagcaaacaacagattttgatcacaaactggttgcattatccgacgatatgaatgggaagattcaaatattgaacaataggatcgagcaattgactacaaacaaagaagatgttcgtgctattgagttaaggagtggaaaacagccaaatccagtgcttcaacgagagcttcctgcagccaaaatcgtgaatttggaagaaaatgatgttgcagtttttacagaccagacaccagtgtcgaccgacactactgggtgtcgatcgacaccagccacggtagacactacagaacgcgacagtgtcgaccgacaccaatagggtgtcgatcgacaccaacccagtccaaacctgcgaattctccaaaacctgatttcagctgcagcaaaggtaacaaaacccaaggttccttttcccaagagtcctaagaagttcaaataggagcttgatgatgatgctagatgcaaagctatgatggataagttgattgtagagatgccacttatagatgatgtgaagtcttctcctatgatcagacagtttgtgaagaggatggttactaaggatatgcttactgagaaagctgtgatgacgatgtctacacaggttagcgacattattcagaacaagattctaccacagaaacttccagatccaggtagctttgttctcaattgtggtatccttaacgagagttttgatcgatgcttgtgcgatcttggttctagtgtcaacttgatgccatgttcagttgcgctccggcttggtttgacagaattagagcgtacccaaatcactcttgttcttgctgatcgatctgtccgtagacccgatggtatcctatgcgatgtccctgtacaagtcggtactagctacattcctacagattttgtggttttatcttatgagaaagaaccgaaagatcctttaatcttaggaagacctttcttagccacaactggtgccattattgatgtaaggaagggcagaatagacttgaatgtaggtgatcttacaatgcagtttgacatgaataaggtggttaagaagcctaccatcgatgggcagactttctatgtggatactatctcttctctggctgacgaatttctcatgaagatgacacctgctgatcctttaaagcatgctctgattccctcaattgacaaagttcccgacgggtatggtaagctgctggataggagtgagcatgtaatgcaattggttgctcaagaggagttaattgggacatcttcccaagcagcaacaattggcgatgggagcccagaaaaagctcctaaagctgatctaaaaccacttcctgcagggctaaggtccatatttcttggtgaaaactctacttaccctgtcattgttaatgcttcgttaaacaaggcagagctcactttattgctaagcaagctgcgcaagtatcacaaagctcttccctattctcttgatgatattacatgtatctctccagacttgtgtatgccctcagttgagcatcataggattcacctcaaggatgagtctaagccctcagttgagcatcagaggagactaaacccgaatctcaaggatgccgttaagaaggagatcatgaaattgtttgaagcagggatcatctatcctatttcagataatgattggggtagtccagtgcatgtggttccaaagaaaggaggtgttacagtggttaagaatgacaataatgagttgattcctacacggactgttaccggccataggatgtgtattgactacaggaagctgaacgctgcaacaaggaaggatgattttcctctaccattcattgatcaaatgctggaaaggttagctaatcataagtactactgctttcttgatggatactcaggattctttcagataccaatccatccaaatgatcaggagaagaccacattcacgtgtccctatggtactttcgcttatcgcagtatgtcgtttggtctttgtaatgctcctgcgatattttagagatgtatgatgtcgatattcacagacaagattgaggatttcatggaagtctttatggatgacttttctatttatgggtcttcatttgaagcatgcttggagaagctttgcaaagttctagctagatgtgaagagaagaatttggttcttaattgggagaagtgtcatttcatggttcagaaaggtaaagttcttggtcacaaagtttcaggtgatggtattgaggttgataaagccaagatagaggttatgacaagtttcaaggcactagatagcgtgaaatctgtgaggagttttcttggacatgctggattttacaggaggttcgtcaaggatttcagtaagattgccagaccactaacagctttgctttgtaaggatgtgaactctgagtgtcatgctgcttttaatcagattaagaggccttagtgagtgctccaatagttcaacctccagactggaatttaccttttgagatcatgtgtgatgcaagtgattatgcagttggagctgttttgggacagaggaaaggcaataaactacatgttatacactatgcaagtagaacacttgatgatgcacagcggaattatgcgacaacagagaaagaattgttagctgtggtttttgcttttgagaagtttcgctcttatctggttggttcaaaggtgattgtgcatacaaatcattcaacactcaagtaccttatgcagaaaaaggatgctaagccaagattactaggattcttcttcttcaagagtttgatatcgaagtacgagataagaatgggattgagaatggagttgctgattatttgtcacggatcaaggttgaagatgacgttcctatcaatgattttctgcttgaagaaagtatctacttggttgacacaagtttgcaggaaaattatggcaacgttaattcacgggcagatgagagctgcagagaatcagtgtcgatcgacaccacaccccctgtctatcgacactatcgtgcttcacagacagatggttctgcacctccttcctagcccacatctatttcagttccctatgatagctactcctccatctcttctcttacttatccttctattacttcttcaaaatctttgaagtgtgcttcaccggtaaacgaacatcgagtttctcgggagcttgtttcctctactgattttgcaagtaacagagttagtatcgatcgacaccaccaacagtgtcgatcgacaccagatgttgcacatagcagatctgtttacactccgccttggaaggcgagattgcagcataagtcccatgtttatccatccaagtcctgaactccgccaagttaagctattgactataaaaaaacgcttagtgggaggcaacccactagtatgattttctttttttttttcttttttttttcatttttcttttatttttctcgcttactatagatttaaatgccactgaggatagtgacttttaagtcttggggaggttgttactatctacgtttttttttttgtcttattcttactcttattttattttttgagtcattttattgagtcaaaattttgttaggaatgatgatctctctttcgagtttattgcctggattgcttaagtattgcagattcaaatcaatatgactaatggaaaatccagaaggccaaccaacaaacttaaggacatccattcctaacataatctacaaaggctggagctaatctcactgctcttccttttacctcatcaaaacggttagtgttcgtatgacttgactccttgttcatacctgataaatcgactaatgtggtaaaaaaaaaaagtattcatctcccttgataaaaaaatgtataataatgagagattgacaggattttcagatagtgtataggggtaggaatgtttcgtatgaccccattattatacattgtttgaaatggtcaattacaaaggttggaaaaaggctgagggtgtcgatccagtatgcgatctggggagagaaagaataccataaataaaaagaaaatgaatggtcgattggttatggtatagtacatgaatgagtctagaaggttcttaaacgttaacttgattgatgagaccccgcaatgagagcctaatggatatattgagtgctttgatatggaatctatgatgttgtgtgggctatcggagaattacatagtcgtcaggatttgactagaactgtttagtgcatggattgggtttttatgatcacggtaataagctagagagattggtagttcctatgttttcaaacctcttccacgggttcggcttttgtgttttgcttgagggcaagcaaaagctaagtttggaggagttgatatacctcaatgttcactgcttttagctatgatttaggtatagttttaaaagtcctttttgttatttgtagagtcttttgtactctttttcaggtctttacatgtttgggatgcatttagagattatagagcattctagagcaaaacagacaacttaggctgcggcagcaattcggagacggaaattgacgtaggtgtcaatcgacacaacccttggtgtcgagcgacaccaatacctgacggtaattcaattgcgcaacttattcgtgttttaaagatttccaaattcggcccagacattttaagacttatatattgatatttatggtcattgtttagacctaactcttattatctcttttattcttgggagcaaaaccctgtggagactccctttagaaaagattcttctaaactcttttctcttcttaatttcatcattgatttcttattcaatcatgttttgttcttctatgatcatgcttgagtagttctcttgttgggtttagggattctcattagggatttggatgaattagtagatcaaaaactctattaggataatatatttagaattcttcatcttagattgttcttaatgctacttttagtgtaacaaactagaatttgattttaggataataggtatgcccaccataggtatctattactggaactatcttagatgagcctagtatttagatgcgagctagcgtccattacttaggtgaacttatcaaacctgattataatgcttgcttagttctagggatttacaagagagttgggatcaatactattaagcgtagtgagtatcacggaacaccaccggttactctatattagtgatttcagttctagaatagtttgataatattcctaatttactactagatctactattctgatatttccttagaattttcctaagcccgacatcttaatcatctaaatctacaacaaattttaattgctttcttatcttttacttttatattattttctgtttagctttattaaaaactgttaatctattgtgtgattcgagaattttgtggaattcgatccctaagtgctataacaacctctttatttgagagagtagtcattagggtaatttgactcatatcatatacctaattgtttggtcattgggagacctaagttttgttttagagattgttacacatgttgagagaagaatccaatccttttagagaggattcttaactcctttacatctattcttaattcatcaatgcaaactattcagattatgatttgtgtttctattatcatgtctcagtaattaccttgttgggtttaaggagtctcaatagggatttagatggattagtaaatcgaaaacccattaggattattcttagagttcttcatcttgattattcttattgctagttttagattgatcccctagaacttgatattagataataggtatgcccgttataggtacttgttattagaactatcattgatgagcctaggcatttaagaaagaacaggtatgctcatagaagggctctggtttatatactatgtgaactaatcaagcttaataacaatgcatgctttagcataagatttctcggcttctctggttatcttagctctaagtatagagagtttcgcggaacgccactggttactctagaatcatagtttgagttagagaactgtgctataacaatcctaatattagctagatctacaatttatctatctcccgagacaattccttagacccgatgctttaatcacttgaatctacaactcgtttacttgtttatttgtcatttacattcaattacttcattcaataacatcataagtctattgtttgaacagcgagagctcagtggaattcgaccctgaagtgtgataagtgtgtattttgcatgttttgagcatccatttgtcatcattttagcatcatatcatcactgttttataccatttcacatcatttgtcaccactttgcatgtttaggatagttttgcatgcatgttgcatatttgcgttgatttcaggtgatttggagctgttgacgagccatcttgaagaagcagacctgatcacgacaaaccactcgaccaagaggtcgagcaggagcttcaagatcccaagagaccactcgacccccaggtcgagcataggacatcaccacttcacttcaccactcgacctcttcactccacctggaagtcgagtatcttctgacaccactcgatcacctcgctcgacccccaggtcgagtgctttcaccttcactgctagaccactactcgacctcatcactctacctagaggtcgagtacctccatcacaccgctcgactgcatactcgatgacaagcttcagagccttcttcatttcgcactcaaccagacactcgagcacaaggaagaaaagaagactccagctattcactcgacctctcactcaaccacctgggtcgagtacagttcttaacccatccaaatactttgtcgttttgagtattagggtttcaggatatttggctataaatagcatgtacttctcattttcgcagacaagaagtttttacctagttttatttctgcagaccttgtgttctagactttttgtaatccggatttctctttatctattcagtattcagctttggttcttgattttcgtttactgttgttcattctgttatcacactactgttacactattgttatcatgtcttcaacctgttcaacgtttatgctttctgttatgatgtctgagtagtgaataggtttctgaggatgggttagagtagtgtagaattctcagaatgctaggtgattgagtattgattgatagatcccttctggattagttgttcttaatgcctattgctttctgatcaactggaatttgagcccagacatttccgcgcccaaaaggtgttcgatgaaatgtctgaaccactaattccagagattcgtgaccctgtaccagggtattggttgcaaggagcgttttggctttaacttgttgattcgtaatgcctggtaggttagctctcgtcaatggtgattgagtctgggactaggttagcttgagagtctctgttgcggtggcacttaaatttggttaatgaacttgttgtctagggttaatttattgaacatgtcaatcacctgtaaactgaggaaacgaaactactcaattatcccatccttaggaattctttatctgattgattttattgtttactctactactgtttactgcatcctgtcatctgttgcttagtttctgcaattctttactgttactcgatctgatactcgaccacccagttgtcttgcaacagactgtgcagtcgagtatccctgtttcattttctgtctgttactcgacctgtcactcgacctcacccagagctctgcaaagagctgtgttggtcgagtgttttactgtttctgtttgattttttgttttctgcatgttcacttaggactgctggaacacaccaaaacctgttatgcttggcttgacttagtgacttttgatcacatcttgattgttagcatcacacccatttggattgacaacctaaaatactacaatgacatgattggtgttttaggataattgactaaaaatctattatcaatttggcgccgttgccaattgggtgtttgtttgttacatttaagatttcagacttgcttagatcaagttctttttcaattttcttttcagttacttactatgtttttcttgttgtcttcttgatttaggtacacctctgttgtatgcgaactcgatcaacaggcaaccagaacctccttttcaacgacaacatcaaccgcacagcccgcgaactcagaaaaaggagaaccacagtcaaccctgtacctcagcaaccactcgttatggctgaagaacagaatcaacaaaatggccatgccaacattggtgctggagatgcaccacgtgatcaccgttagaggaagggaattgcacctcctgctatccagaacaacaattttgagattaagagttgtctcatctcgatgattcaggggaacaaattccatggtttgccaatggaggatccactcgaccaccttgatgaattcgataggctctgcaacctaacgaagatcaatggtgtcagtgaaaacggattcaagctccgtttgttcccattctccttgggcgacaaagcacatatctgggagaagaatctgccccatgactcaatcaccacctaggatgattgtaagaaggcttttctgtcaaagttcttctccaatgccagaactgcaagactcagaaatgagatttctggtttctcacagaagactggtgaaagcttctgtgaagcatgggagcgtttcaagggttacaccaaccaatgccctcatcatggctttactaaagcctctcttctcagcactctttacagaggagtcctaccacgcatcagaatgcttctggataccgccagcaatgggaatttccagaacaaggatgttgaagaaggctgggagttggttgagaagttggcccaatcagatggcaattacaacgaggactgtgataggaccgtcagaggaacagctgactctgatgacaaacacaggaaggagatcaaagcgctgaatgacaagctggacaggattcttcttagccagcataagcatgtgcacttccttgttgatgacgagcagtaaccagttggaagaagtcagctacatcaacaacaaccagggtggctacaaaggatacaacaacttcaaaaccaacaatcccaacctctcctaccgcagcacaaacgttgctaatcctcaggatcaggtgtaccctccacagcaacaacaaggtcagaacaaaccttttgttccctacaaccaaggtttcgttcctcagcagcaattctaggggaactaccagcaaccaccaccacctgggtttgcacctcagcaaaaccaaggtcctgctgctcctgatgctgaaatgaaacagatggtccagcagctgctacagggacaagcatctagctcaatggaaatggctaagaaattatctgaattacaccataagctggactgcagctacaatgacctgaatgccaaagtggaggcattgaataccaaagtcagatacttggaaggccaatcagcatctacctctgcaccaaaagttacaggacttccagggaagtccatacagaatccaaaagagtatgcaaccgctcacgccatcaccatctgccaggatcgagaactgccaactcgacctgaccctgatttcatcactgaggacagtgatgttcaagaaggagaggcttctactcaggttgaagtctctgttgttgaattcaaccattccgctggttctcgccatctcactcaatccatctcagaagagaaggccgccataatcgagagaatggtaaaacgattcaaacctactccactacccttacgtgctcttccgtggacattcaggaaagcatggatggagagatacaagtctattgcagcgaagcagttggacgagattgaagcagtgatgccactaatggaagttcttaacctgattcctgatcctcacaaagatgtgagaaatttgatactggagaggatcaagatgtatcacgattcggatgatgaaagtgatgccactccatctcgagctgctgataagaggattgttcaagagaagttagaagatcctggatctttcactctaccatgttccattggggaatttgctttcagcgattgtctgtgcgatctcggagcctttgttagcttgatgccactctctgtgacaagaaggttagagttcattcaatataaaccttgtgacctgactttgatccttgcggataggtcttctagaaaaccgttcggcatgctgaaagacctaccattcatgattaatggcgtagaagtgcctacagacttcgtggtgctggatatggaagtagagcataaggatcccttaatagtgggaggaccctttttagcgtcagcgggagcagtgatagatgtcagggaagagaaaataagtctcaaccttggaaagcatatcaagttgcagtttggcatcaacaaaactccacaagggtcaaccgaagatggaagaacctctggaaatgatagagcgatctcaggagaaggatatgagactgaaagagtgaaagaacttagaaagaagtctgataagcagaatgaaactatagagaagctggcccacaccattgaggaacttaggagtaagctgaatcagatgcagaaggaagctcaacctaaaggcgggattaacactatcccgagaaaagaattcacttcaagatggtctcaagatacagattatcctccagaagagaaggaagcatattttgaagaaagggggattgagtattctgctgcaaacctctcgagggaggacgctgaatatgatgatggtatcagagaggattatgctgaccctctctacagttcattttcttcttgataagtgtgaggagtcaagctagagacttaaaacaagcttacttgggaggaagtcccatgactatccttgtaaataatttttactttcttgttatttttgatttgttttggttatgtttgtggttctcaggaagaagggagtacgtgaaggtaaagtaaaaattcaaaacttttactcaactgatggcctagagatcgagtatagtggtcgagtatgagtgatgtttaaaaacctaaaaaaattttaatcatcattttactcgaccaacagaagctacaaagtcttccagggagtctttcaagtttacagaggattgcgggatttcctagagtttttctagtgaacagagaatacagagaagagacaagaagacaacgagggacccgccgttaacgcccatgtcttccatgcaagagaccaagagacatggaatctcttcactcccactcgatcaccacgcaaccccaccttcactcgatatcacctccatcactcgatatcacctccatcactcgatatcacctccatcactcgaccttgttttctcctccataaccaaataaactcgaccccatccttcttaaatcaacgctccctttttctttttctactcgacctcgacgccatcaccatccccacacctatgaaactcgaccccattccccttattcatcacaaccaacaaacccatcctcatcaaagccaggcacacgaccgcttctcactcgcctcttcaccaccgtctcaagctaccactcgaccgctcctcgccatctctttcaagatcgtctctcatcaccaaacactcgacttcgtcattccccaacatcaacaacgtcactcgactccttatcaccatcgttctctcatctctcgagtccagccatcactcgacaacaccaccgtttcatctcttccgcgagctcaagttcactcgaccgctcctctccttcctttcaaagccactttacttcgccattacacaccgcctctccatctcattatcactcgatctcttgaatcaccaccgcagctcgtctcaaacccactagttactcgaccgcggctccttcacagcttcatcgctctcaccgccatctctcaacatactcgaccttgcgtagtcactcgatctcgccgcttctcaacgcctctccatcgtttccatcgccgctgctctcatccccacgaaagctcgtcatcgccggttcactcgattaagcaaacaaactcgacctctttcaaaccgcttcaccatctctcgcctctcaagatcactcgatcgccaagcacaaccaaggaatcactcgaccgcgagttcaccaaaccgaaaaaaaaaaaaaaaaaaaaaaatttggtacactcgatcggtttactcggttggtttgtgtttttggttttgttggaactaacgtattaacgtttatttttgagttacatttgttttcaggtttcatcatgagtaactacagtggagaatcctctatgtggatgaagctgagtcctggtccgctaaaccgagagagcaacatgtttaccagagtttcagggatgaactcgaacgctctacagcccgacataatcagagaagagctgaaatcgccagaggaaagagggcgatgtcaagtaggtatgagctgattgatgaggatatcgagactgagtatgagccagagtcatggcgcagggagacgaagctgctgaacaaacccgacgaggttacagtggaggagtatatcagattcttcgagatgaatgacttctggggaacaaggtatccgtgttatgagacgttagcccagctggggttactggaggacgtgcagcatttgttcgagaagtgtcatctggagacactcatgtcttacccttaccctgcctataaggaggagacaatcgagtttctttccacgctgcaagtggagatgtatgaagcactcacagactttgagctggataccatgggattaggcttcttgacgttctcagtgaatgaacagcggtatcagctttcgatcaagaagatagaagaactgtttggtttccctagtggaaagggaaccaaacccagatttgacagagaggagcttaaggatttgtgggccactatacggaacaatctaccgctaaactcagcgcggtctaagagcaaccaaatccgaagtcctgtgatccgctactttcagccatcagtcgccaacgtcttttactccagggagtctacaggcaccatgtctaacacggacatggagatgatagattatgcgcttacagggattctccgccggacgaaggggaagaatgtcttgagaggtgatctcaacaacgcaccaccagtaatgcctctgttgatgcatctgtgtggatacaggaagtgggcgttgacaaacgggaagaagaaggtgagaggagcactatgcgtgggtggcgttgtgacgccaattctggaaacttgtggagtcccgctcaaggaaccaggtttagcaccgaggatgatggacttagatcatttgcgcagatgtgagttcttggagtttgacatggctggcgactttcaccgctacaggttcgagcattcatcgattagaatcgccaacattcttctcccctgcattgacgctactaggattcttgagggcaggaacattgacttcaagcctgcgcttgaagatctttatttcgagggtagtccgccaaccgaggagtttagtcacaccgaaggagctacaacagaagatgttgatgagacggatgatatagatgaggcggagtttgacacgagcatgtatcatttcagtgagcatatacctcctacgagggaaagcaaaagtttgagcgaagctcacaggaacaacagcaagctgcagaagtggtgcaagaaacaggacaagttactcgccaagtgcttaagggctatcaagtttctgaaggacaagctcagctgctcctcttccactacagctattccgcagggacatctccctcaggacatgccttcgaggagatatgacgcgcccgagccaagtcggcgcaggcctgagcctagagagcaggagattccgcatgtccctgcgaggcattcttcattcgagcctcatgaatctgggaggaagaggaggaccacactcactcgatctagaagtaggagcggacgacttctgtagtctcgtagtttacgtgaccgcggtgctggccgcagcagaaggagagaggtcgagtttcctcagagcggtgctggccgccacagagctgatgaggtcgagtacccacctgctggagctgattcggaacaaggaggttcttctatggcttgggagcaatcgcaggcagccattgacgagcaactacgttcattctttgactgaggtaagcgcctcacttcaccattgtattataccgtatgttgtgatttgtttctttattttttgtttctgtgattggatttgtcctgaatactctcttccaagtttattcatacagtggactgtgtgatttaagtttgggggagggctcaggaagtgtgtgttgcattgtgtataattttgagtctgcattcatctaaggcatagaaaaaaccaaaaaaatttgaaaaatttcagaaaatgatttcataaaaaaaaagagtgttcatgtagttgcatcacatttaggatcgagtctagagtgtttcatttaggattgttgcatatgtttaggggatgatgatgagatagccttgtaagcattttgattcaccggataaactcagtgccctcgttgctagttgtctgttgcatagtcaatgaatttgaaaaaaaaaaaaacttgaaccatgcctagattgctctactcgaccacactgtcatgatctgataccattccctatcaatttgaacctgaatctgatctttaattatcatgtctgcatcaaatttgaactcatggataccctaaaatacttggattctcttattcattttgatcactcttgttaatccaagtagctgaatctccttattagagcagttaacccaaacccaaacctagactttctttcaagccctatatcacttgtgagtgtttgtgaggtcttattccgattaagcttggtagaaagtgttaggttcgtaacgagagagatagtgtctcatgtagttctagttcgcattttttggactagataggattaggtgggcgcttatactttgggttgggatgtgtttaaaagaaaaaaaaagggttgattcaatgataagaaaaggtagaagactctaggtgaagtaagctaaagaagcagaaaaagtctagtaaaggttttgggatttgtaaagaaaagaaagagttcttgttagctattggagatgggcaaaagcccttggctttaaaatgttaaaaacaggaactttagttgttaaagaaatccaaatccgctagatgtaacaaagtgttgagaaagcttctcctagagttaagagaaaagaaaagaatgattagaaaaagggcttaaaagattcatgaatgcaaagggtagagtttagttcttgtattgggattggagatgggattaccattagtgcttcatttgatgtactctgggtagatgggatcttatctctgtaggcatagcttgggacttacctttagcattctactaaagcttaatcattttttgagagatcccctgttactgaagcctattctgtaagggaccatctttgtctcttgaccttttaccttaaccaaatgagttctttgatgatgcattgcttgattcacgttccagaactaatgaatgttaaagggattggtagatttgaaaacttgtgtaggtcgagcatatgagtcggattgattgattgatgaggcatggctaacgtttttaagtagaattcgatcttgcagcttagaacttttaacttggacattgatttcatctagtctatcttgtgttttggctctgagtccccgctttcaaacctcacttccagcttattcttgattgtttgcttgagggcaagcaaagactaagtttgggagagttgataagtgtgtattttgcatgttttgagcatccatttgttatcattttagcatcatatcatcactgttttataccatttcacatcatttgtcaccactttgcatgtttaggatagttttgcatgcatgttgcatatttgcgttgatttcaggtgatttggagctgttgacgagccatctggaagaagcggacctgatcacgacaaaccactcgaccaagaggtcgagcaggagcttcaagatcccaagagaccaatcgacccccaggtcgagcataggacatcaccacttcacttcaccactcgacctcttcactccacctggaagtcgagtatcttctaacaccactcgatcacctcactcgacccccaggtcgagtgccttcaccttcactgctagaccactactcgacctcatcactctacctagaggtcgagtacctccatcacaccgctcgactgcatactcgatgacaagcttcagagccttcttcattccgcactcaaccagacactcgagcacaaggaagaaaagaagactccagctattcactcgacctctcactcgaccacctgggtcgagtacagttcttaacccgtccaaatacttcgtcgttttgagtattagggtttcgggatatttggctataagtagcatgtacttctcattttcgcagacaagaagtttttacctagttttatttccgcagaccttgtgttctagactttttgtaatccggatttctctttatctattcagtattcagctttggttcttgattttcgtttactgttgttcattctgttatcacactactgttacactgttgttatcatgtcttcaacctgttcaacgtttatgctttctgttatgatgtctgagtagtgaataggtttctgaggatgggttagagtagtgtagaattctcagtatgctaggtgattgagtattgattgatagatcccttctggattagttgttcttaatgcctattgctttctgatcaactggaatttgagcccagacatttccgcgcccaaaaggtgttcgatgaaatgtctaaaccactaattccaaagatttgtgaccctgtaccaaggtatttgttgcagggagcgttttggctttaacttgttgattcgtaatgcctgttaggttagctctcgtcaatggtgattgagtctaggactaggttagcttgagagtctctgttgcggtggcacttagatttggttaatgaacttgttgtctagggttaatttattgagtatgtcaatcacctgtaaactgaggaaacgaaactactcaattatcccatccttaggaattctttatctgattgatttttttgtttactctactactgtttactgcatattgtcatctgttgcttagtttctgcaattctttactgttactcgatctgatactcgaccacccagttgtcttgcaacagactgtgcagtcgagtatccctgtttcatttcctgtctattactcgacctgtcactcgacctcacccagagttctggaaagagctgtgttggtcgagtgttttactgtttctgtttgattttctgttttctgcatgttcacttaggactgctggaacacaccaaaacctgttatgcttggcttgacttagtgacttttgatcacatcttgattgttagcatcacacccatttggattgacaacctaaaatactacaatgacatgattggtgttttaggataattgactaaaaacctattatcaaagtgctaacgacgatctcttatttgagggagtaagcttaaggcaatttgagctatattaatatgcaacaactgagaaggaacttctagctgttgtattcgcatttgagaagttcagaagctatttggttggatccaaggtcactgtctataaagaccatgcaactttgaggcatatgtatgccaagaaggatactaaaccaagactgttgagatgcatacttctgttgcaagagtttgacatggatatagtagacaagaaggacattgaaaatggtgcagttgaccatctggcaaggatgagaattgaagaacctattcaaatagacgactcaatgccaaaagagcaactcatggttgtagaattcttcggtgggagctacagtgggaaagagttccaccaactgagtgctattgagggaagatctccatggtatgctgatcacgtcaattatttggcatgcgaagtagagtctcccaagttgaccagttatgaaaggaagaagtttttcagggacatacacccttactactgggatgagccttacctttacactctctataaagataagatttacaggagatgcgtctcagaagatgaagtagatggtatcctgctacattgccacggctctgcatatggtgtccacttcgcgacattcaagacagtgtcaaagattctgcaagtagatttttggtggccaacaatgtttaaagacgctcaagcagagaaagggcaacattagcagaagaaatgagatgcctcagaacccaatcttggaaatggagatcttttatgtatggggaattgattttatgggtccattcccatcttcatacggtaacaagtatatactggtcaccgtagattacatatgaaagtgggtcgaagctatggtcagtcctactaacgatgcgaaagttgtgctgaaactgttcaagaccataatcctcccgagatttggagttccgagggtagtaatcagtgatggtggaaagcatttcatcaaggttttcgagaacctcctgaagaagcatggagtaaagcacaaggtcgctacaccttatcacccacagacaagcgggcatgttgagatctccaatagggagataaaaacaattatggaaaagactgttgggattacaaggaaagactggtctgcaaagctcgatgacgcagtgtgggcttacatgacagctttcaagacccccattggtacaactcccttcaatcttctctatagaaaatcatgtcacctacttgttgagctcgagtacaaagatatgtgggcggttaaactactgaactttgacataaataccgctgaggagaagcggttgatccaacttagtgaccttgatgagatccgtttagaagcttatgagagctctaaaatctacaaggagaggaccaagcttttccatgacaagaagatcatcaccaaggatttccaagttggagatcaggtgcagctattcaactctcgcctcaaactttttccaagaaagcttaagtctagatggtctggtccgttttgtatcagtgaagtccgcccttatggagcagtcactcttgctggtaagagtgaaaatttcacagtaaattgtcaaaggctcaagaaatacttagcagatcaaatctttccagaggtgacgtcggttcatctcccggaacttcttgatggttaaaggagtaatggtgtcgagctaatgacttaaaacaaggtcacttgggaggaagtcccatgcctttctctgtacatattttttgttttctttgttatttttgatgcgttttactagtgttttcaggagataaccgccaatgtttaagtgtaatggatccaatctcagagattcactcgaccgcatgccgtagagatcgattgtctgtgtgcaatccagcataaacatggtttcaattggagctccaagatgtcactcgatcacactggccacatgctaatgaggatctgtagtcgagtaaatttgatgatttggatcctttatactcgaccgtttactcgaccaacagagatttgtagaggatttcaggatttcctgaggttttcccagttaacagggaacagtgcttaaagacaaaacaacagagcgtggaccacactcgttttctccctgaaaataagatggaaagagaatcacaaattcaatctccacaacaatttttgaaattgccctcatcctaacaaaaagtatgtttactcgaccaatctcttttcatccatccaccgacactccaatctctctccttcgtcataaatcgccatctctctctcgtccaacgaatttactcgaccgcgaagagcaaacacaccggagcaccactcgtcatactcgactgccgtgaaaagaatcatctactcgaccacctctacgctgctgcagtcaagttccctgtcttattcaccgtcgaaacctcaagaactactcgattttagccgagaactactcgattccgaccactcgactttaacgcctcactaccattaccaagttcaccatctctgctactcgaccgtcgatccgtgattctgtcctcgccaattccggctcaccatcgaagtactcgactgcctaatttcaccggttgtacacgacttcctcaactttactcgacctcatgttctactcggttcaaattgtgaaagaagaactcgggaatgcatcgatttactcgagtactagattatactcgacgaacttggtctatttcattctctgttgataacgattctggtttcattgttttctttaagactaacctattgacatttgagttttgagttctcaatctaattacagtgacggttcgtcaatggatcctgactatcacatggatgaggctgagtcttcatcttcaaggccagaaagagaacagagagaatatgataacttcaggagaaaagctgaggtagctcgagggaagagagcaatgacaaagaggtatgtgctgatagatgaggatctggaggacgagtatatgcctacgcatactcgcagagccacagaacttctgcacaaacctgatgtattgccagctgaggagtatatcaggctcttcaagctgaatgagttctactgcacaagatatccttgctcgactacgctggcacagcttggattactggaggatgttcagcacatgtaccagagttggcacctggacactttgatggcttactcatatgtagcctatgaataataaacgattcagtttctttccatactacaagtggagctttaccaaggtatgacctctgatgatttggaaagtgaaggagtgagattcttgcaattctatgtgtatggtcagggttatatgctatcaatcaagcgcatggaaggattgttcagtttcccagtggaacgggtactaagcccaagtttgacagataagagttgaaagatttatggatcaccattggcagctctgtaccgctgaattcttctagatccaagagcaatcagatacgcagtcttatcatcaggtacttccagcattatgtagctaatgtcctctactcccgagagataacatggattgtcaccaattctgatatggagatgatcgctttggctctcaaaggcactctccgccaaaccaagaacaatatgtctctccaaggtgaaaccaatgacacatatctctctatacttcttctgataaacctgtgtggatacaagagttggtctgtcaacaataaccacaagagagcacgaggcgctctttgcataggaggtgttgtgacaccgattctgatcgcttgtggagtcccaaagacatctgatggacttgaaccacgggaaatggatatcgagcaattacatcactacgaaatccttgagttcgcaatggttggcgacatgcatcgtttcaaatttgagcactctacagataagaaagccaacatccttctcgctagttctgaggttacacgcataatagagggagataacattgatttcaggcttgagctcgataacctctattacgagaacgctcagcaacatatgaggatgttcatacagaagaagctaccgaggatgggatggacgaagacagagaagtggagtatgaccatgtatcattgtagtgaggatgtacctccagcgagggagagcaagagtttgagtgcctgagccaagtcaggacatgccagagcctagtgagcagagagtctcacatgtccctgctagacatatgaggatgttcatacagaagaagctaccatctttgtctcttgacctataccttagccaaatgagttcactgatgatgcattgcttgattcatgttccagaactaatgaatgttaaaaggattggtagatttgaaaacatgtgtaggtcgagcataagagtcagattgattaataacaaggcttagctaacgtttttgagtagaattcgatcatatcgcagcttataactaccaacttggacattgatttaatttgatttatctggtgctttggctctgagtctctgctttcaaacctcacctccagcttgttcttaattgtttgcttgagggcaagcaaagactaagtctgtggagttgataagtgtgcattttacatattttgagcatccatttgtcatcacattagcatcatattaccactgttttataccatttctcatcatttgtcatcactttgcatgtttaggataattttgcatgaatgttgcatatttatgttgttttcaggtgatttggagctgttggcaagctaattggatgaaatggacctaatcatatcaatatactcgaccctgaggtagagtactgccatcctggaatttctgaagcacccgatcacacctccgcagccagtcactcgaccgcaacactctggttcaccactcgaccccctggtcgagtagaaggcatcaccacttctctccaccactcgacaccctggtcgagtatcaccatctctaccactccacgttcactcgatcacctccactcgattacatagtcgagtaccaccatcatccaccactcgacatcatactcgactgccagcttcaaagtcttctccattctgcactcaatcagacactcgagcataaggaagagaagaagactccagcttaccactcgaccaatcactcgaccacctgggtcgagtgccgttcttaaatccatcccaatactgtgtcgttttaagtattagggtttcagaatattttccaacaataagtagcatgtactttacattttccaaaaaagttttaattcggcagacactgtgtgttcttgacattttgtaatccgaatttctcttaatctattcagtatttgcttttcatttcgtttactaagtttttcatcatgttatcatcttgatattactctgttgctatcatgttttcattcttatcatcgtttattctttctacaatgatgtctgagtagtgactaggtttctgaggatgggttagaatagtttagaattctcagtatgctaggtggttgagtttgatttatagatcccttatggattagttattcttaatgcatattgttttttgatcaactggaatttgagcccagacattcatggctctgtacaaaggtattggttacaaggagcgttttggcttaacttgttgattcgtaatgcctgttaggttagctctcgtcaatggtgattgagtctgggactggtttaacttgagggtctctgttgcggtggcatttagatttggttatcgaacttgttttctagggataatttattgagcatgtcaatcacctgtaaactgaggaaacgaaactactcaattaccccatcctcgggactttctcatctaattgatttctttgtttaatctgctttgtttactgcatcttgctgcatgttgtttactttttgcatttcttgcgtgatactcgaccacccagttgtttggcaactacccagttgtctggcaagagactgtgcagtcgagaatccctgttacattttctgtctgttactcgacctgtcactcgaccacacccagtgcttggcaacgagctgtgttggtcgagtgttttaactgtttctgcttgaatttttgttttctgcatgttcacttaggcctactagaaaccccaaaacctattattgcttggcttgactctgtgaactctgattgcatcttgattgctagcatcatacccttttggattgacaacattcagtactacaacgacatgatattgctttaggattaattgatcttaaaaacctattatcaagtagatggggtatccttacatagcgggtgggacccacgataaatggttcttaaagttttcaaaagcaaataaatacgattgcattgcatatataaacaaatgcaatcataccagcactaattcaccggatcccatcagaactccgcaattaagcatgcttgggcgagagtagtactaggatggaagacctcctgagaagttctcgtgttgcatccctcatttttttttggtttttctctttttctttgttaaaaatttatgactgtataacttttagactgtgagtccaaacttgggatgagataccttttcgcaaagctcaaagagagctctccgacatagaggaagggcaatggaataattccattggttttttttcctactccaaattttgaacataaggtacttttttgggccttttcgtgatctatgctatattacggggcaaaaattatatgttcgaacattgttttgaatattttgcatgtatcaaagctcgaataaacaagatatggtattcctacatagctggtgggacccacggcgaatagatcataaagtcttcaaaaaagaatacatacgattttattggatgtagtaaccgatgtgatcatacgagcactaatgcacctgatcccatcggaactctatagttaaccgtgcttgggcgagagttgtattaggatgggtgacctcctaggaagtcctcgtgttgcatcccttttttttttttttagtttttatcttttttttgttaaaacttttatgactcaataacttttagattatgagaacttggcatgtgataccttttcggaaagcccagagagagccctccgacgaaacaggaaggacaatgaaatttttccatttttttttttactcccaaattttaacctaaaggtactttttcgtaatgcctgtaaggttagctctcacatcatttcatattcgactccaaaacactaacaaagcttcttcttgcttctcaaagttttgatggtgtagacgaagtccgtatgagtgcttgtctttgtatcttctaacaaggatacaatacttaggcttttaagatctggttgcggttctagttgttatactcactcatacttatgctttgtatgagtgagtataacaaatagaaccgcaaccgaattttaaaagcctaagtattgtatccttgttagaagatacaaagacaaagactcatacggacttcggctcaccatcaaagctttgacaagcaagaagaagcttagttagtgttttggagtcaaatatgacttaatgtgatgtgtatgattgagtataagaacttaaaccgcaactcgatcataaaagcctatatagtgtttccttgttagaagatacaaagccaaagactcatacggacttcatctacaccatcaaagatttgagaagcaagaagaggcttggttagtgttgtggagtcatatatgactagatgtcacgtgtatgagtgagtataacaactagaaccgcaaccggattttaaaagcctaagtattgtatccttgttagaagatataaagacaaagactcatacgaacttcggctatactatcaaagctttgagaagcaagaagaagcttggttagtgttttggagtcaaatatgagttgatgtgatgtgcattattgagtataagaacttaaatcgcaatcggatcttaaaagactaagtagagtttccttgttagaagatacaaagccaaagactcatagggagtttagctacaccatcaaagctttgagaagcaaaaacaagcttggtttgtttttggagtcaaatatgacttgatgtcatgtgtatgagtgagtataacaactagaaccgcaaccagatcttcaaagcctaagtattgaatctttgttaggagatacaaagaaaaagactcatacggacttcggctacaccatcaaagctttgagaagcaagaagaagcttggttagtgttttggagtcgaatatgacttgatgtcatgtgtatgattcagtataagaacttaaaccgcaaccggatcttaatagcctaagtagtgtttccttgttagaagatactaagccaaagactcatacggacttcatttacaacatcaaagctttgagaagcaagatgaggcttggttaatgttgtggagtcaaatatgactagatgtcatgtgtatgagtgagtatagcaactagaaccgccacggggttttaaaacctaagtattgtatccttgttagaagatacaaagacaatgactcataaagacttcgactacaccatcaaagctttgagaagcaagaagaagcttggttagtgttttggagtcgaatatgacttgatgtcatgtgtatgattcagtataagaacttaaaccgcaacccgagcttaaaagcctaagtagtatttccttgttagatgatacaaagccaaagcctcatacagactttagctacaccatcaaagctttgagaagcaagaagaagcttggttagtgttttggagtcaatattattagatgtcatatgtatgagtgaatatgacaaataggatcgcaaccgaatcataaaagcctaagtattgaatctttattagaagatacaaagacaaagactcatacagacttctgctataccatcaaagctttgagaagcaagaagaagcttgctaagtgttttagagtaagactagatgtcatgtgtatgagtgcgtataacaactagaatcgcaaccagatctcaaaagcctaagtattgtatccttcttagaggatacaaagacaaagactcatacgaactttgactacacaatcaaagctttgataagcaagaagaagctttgttagtgttttggagtcaaatattactagatgtcatgtgtaagagtgagtatgacaactagtacaacaactgaatcttaaaaacctaagtattgaatctttgttagaagatacaaagaaaaagactcatacggacttcggctacaccatcaaagctttgagaagcaagaagaagcttggttagtgttttggaatcgaatatgacttgatgtcatgtgtatgattcagtaaaagaacttaaaccacaaccggatcttaaaagcctaagtagtgtttccttgttagaagatacaaagccaaagactcatctggactttatttacaccatcaaagctttgagaagcaagaagaggcttggttagtgttgtagagtcaaatatgaatagatgtcatgtgtatgagtgagtataacaactagaaccgcaaccggatattaaaacctaagtattgtatccttgttagaaggtacaaagagaaagactcatacagactacaccatcaaagctttgagaagcgagaagaagcttggttagtgttttggagtcgaatatgacttgatgtgatgtgtatgatttagtataagaacttaaaccgcaacttgggctttaaatgccttagtagtgtttcctcgttagaagatacaaagcgaaagactcatacggagtttagctacaccatcaaagctttgagaagcaagaagaggcttggttagtgttttggagtcaaatacgactagacttcatgtgaatgagtgagtataacaactagaaccgcaacctgatcttaaaagcctaagtattgtatccttgttaaaagatataaagacaaagactcatacggacttcggttacaccatcaaagctttgagaataaagaagaagcttggttagtgtgttggagtcgaatataacttgatgtcatgtggtttattgagtataagaacttaaactgcaaccggatcttaaaagcctaagtagtgtttccttgttagaagatacaaagctgaagactcatacggagtttagctacaccatcaaagcattgagaagtagaagcagcttggttagtgttttggagtcaaatacgactagatgtcatgtgtttgagtgagtataacaagtagaaccgccaggtgatcttaaaagcctaagtattgtatcattgttaaaagatacaaagacaaagacgcatagagacttcggctacaccatcaaagctttgagaacaaagaagaatcttggttagtgttttggagtcgaatatgacttgatgtcatgtgtatgattgagtataagaacttaaaccgtaattagatcttaaaagcctaagtagtgtttccttgttagaagatacatagtcaaagactcatacgtagtttagctacaccatcaaagctttgagaagcaagaagaagcttggttagtgtttaggagtcaaatatgacttgatgtcatgtgtatgactgagtataacaactagaaccgcaaccggatcttaaaagcctatgtattgtatccttgttagaagatacaaagacaaagactcatatggacttcggctatgataatagctttttagtcaattatcctaaaacaccaatcatgtcattgtagtattttaggttgtcaatccaaatgggtgtgatactaacaatcaagatgtgatcagaagtcactaagtcaagccaagcataacaggttttggtgtgttccagcagtcctaagtgaacatgcagaaaacagaaaatcaaacagaaacagtaaaacactcgaccaacacagctctttgcagagctcagggtgaggtcgagtgacaggtcgagtaacaaacaggaaatgaaacagggatactcgactgcacagtctgttgccaaacaactgggtggtcgagtatcagatcgagtaacagtaaagaattgtagaaactaagcaacagatgacaggatgcagtaaacagtagtagagtaaacaataaaatcaatcagataaagaattcctaaggatgggataattgagtagtttcgtttcctcagtttacaggtgattaacatgctcaataaattaaccctagacaacaagttcattaaccaaatctaagtgccaccgcaacagagactctcaagctaacctagtcccagactcaatcaccattgacgagagctaacctaataggcattacgaatcaacaagttaaagccaaaacgctccctgcaaccaataccttggtacagggtcacgaatctctggaattagtggttcagacatttcatcgaacaccttttggacgcggaaatgtctgggctcaaattccagttgatcagaaagcaataggcattaagaacaactaatccagaagggatctatcaatcaatactcaatcacctagcatactaagaattctacactactctaacccatcctcagaaacctattcactactcagacatcataacagaaagcataaacgttgaacaggttgaagacatgataacaacagtgtaacagtagtgtgataacagaatgaacaacagtaaacgaaaatcaagaaccaaagctgaatactgaatagataatgagaaatctggattacaaaaagtctagaacacaaggtctgcggaaataaaactaggtaaaaacttcttttctgcgaaaataagaagtacatgctacttatagccaaatatcccgaaactctaatactcaaaacgacgaagtatttggacgggttaagaactgtactcgacccaggtggtcgagtgagaggtcgagtgaatagctggagtcttcttttcttccttgtgctcgagtgtctggttgagtgcggaatgaagaaggctctgaagcttgtcatcgagtatgcagtcgagtggtgtgatggaggtactcgacctctaggcagagtgatgtggtcgagtagtggtctagcagtgaaggtgaagacactcgacctcatggtcgagtgaagtgatcgagtgatggagacgagggcactcgacctcgtggtcgagtggtgaagtgaagtggtgatgtcctctgctcgacctgggggtcgagtggtctcttgaggtcttgaagctcctactcgacctctgggtcgagtggtttgtcacgatcaggtccgcttcttccagatagctcgtcaacagctccaaatcacctgaaatcaacgcaaatatgtaacatgcatgcaaaactatcctaaacatgcaaagtaatgacaaatgatgtgaaatggtataaaacagtgatgatatgatgctaaagtgatgacaaatggatgctcaaaacatgcaaaatacacacttatcaactccctcaaacttagtctttgcttgccctcaagcaaacaatcaagaacaagctggaggtgaggtttgaaagcggggactcagagccaaagcactagataaaccagatgaaatcaatgtccaagttgaaagttctaagctgcaagatcgaattctacttaaaaacgttagccatgcctcatcaatcaatcaatccgactcatatgctcgacctacataagttttcaaatctaccaatccctttaacattcattagttttggaacgtgaatcaagcaatgcatcatcaaagaactcatttggttaaggtaaaaggtcaagagacaaagatggtcccttacagaataggcttcagtaacaggggatctctcaaaaaatgattaagctttagtagaatgctaaaggtaagtcccaagctatgcctacagagataagatcccatctacccagagtacatcaaatgaagcactaatggtaatcccatctccaatcccaatacaagaactaaactctaccctttgcattcatgaatcttttaagccctttttctaatcattcttttcttttctcttaactctaggagaagctttctcaacactttgttacatctagcggatttggatttctttaacaactaaggttcctgtttttaacattttaaagccaagggcttttgcccatctccaatagctaacaagaactcttttttttctttacaaatcccaaaacctttactagactttttctgcttctttagcttacttcacctagagtcttctaccttttcttatcattgaatcaaccccttttttttttttcttttaaacacatcccaacccaaagtataagcgcccacctagtcctatctagtccgaaaaatgcgaactagaactacatgagacactatctctgtcgttacgaacctaacactttctaccaagcttaatcggaataagacctcacaaacactcacaagtgatatagggcttgaaagaaagtctaggtttgggtttgggttaactgttctaataaggagagtcagctacttggattaacaagagtgatcaaaatgaataagaaaatccaagtattttagggtatccatgagttcaaatttgatgcagacatgataattaaagatcagattcaggatcaaattgatagggaatggtatcagatcatgacagtgtggtcgagtagagcaatctaggcatggttcagtttttttttttttcaaattcattgactatgcaacagacaactagcaacgagggcactgagtttatccggtgaatcaaaatgcttacaaggctatctcatcatcatcccctatgcatatgcaacaatcctaaatgaaacactctagactcgatcctaaatgtgatgcaactacatgaacactcttttttttttgtgaaatcattttctgaaatttttcaaattttttggtttttctatgccttagatgaatgtagactcaaaaatatacacaatgcaacacacacttcctgagccctcccccaaacttaaatcacacagtccactgtgtgaataaacttggaagagagtactcaggacaaatccaatcacagaaacaaaaaatgaagaaacaaatcacaacagacggtataatacaatggtgaagtgaggcgcttacctcagtcgaagaatgaacgtagttgctcgtcaatggctgcctgcgattgctcccaggccatagacgaacctccttgttctgtatcagctccagcaggtgggtactcgacctcatcagctctgtggcggccagcaccgctctgaggaaactcgacctctctccttctgctgcggccagtaccgcggtcgagtgatctcctcgagtaaatgaggcgtgatctgctgctagatcgagtgagtgtagccttccttcttctcttgtgttcccaggattcgaatgacaaatgcctagcctggacatgtgggactctctgctcgctaagctcaggcctgtgcgcaggtgcattaattctactcgatggcatctccataggaggctgtacctgtggaatagcagtggtggaggaagagcaactcagcttatctgtcagaagcttgaaacacttggcgatcagcttgtcctgcttcttgcaccacttctgcaatttactgttatttttatgagcttcagtcaagctcttgctctgcctcgctggaggtacatgttcagcaaagtgatacatgctagtgtcgaacttcactgccctatcttcatccatcccatccgaggcagcttcttcaagaagatcatcctcatccaatggcggagcgttctcatagtagaggcgtccaatctcaggcctaaaatcaatgttatctccctctattatccgtgtgacctcatggctagggagaaggatgttagctctcctgtctgtagagtgctcaaacctgaacctgtggagatcgtcaaccattgcaaactccaggaattcgcagtgacgtaggtgctcgatatccattgctcgcggctcgagtccagcagaaatgagtgggactccacaagctatcagaatcggtgtcacaacgccacctacgcacagagcgcctcgtgctctcttgcggttattggtgacagcccaactcttgtatccacacaaatggatcagaagaagtacatctaggggtgtgtcattaatttcaccctggaggggcataccattcttagtttggcgaagagttcccttgagggccattgcgatcatctccatatcagagttagtgacagtccctgtaatctctcaggagtagagtacgttggctacagaacgctggaagtacctgatgacagggctgcgtatctgattgctctttgacttggaagcattcaacggtacagagctgccaatggtgatccacaagtctttcagctcttctctttcatactttggcttagatcccattccactggggaagccaaacaatccttccaatcgcttgattgataacctatactcatgaccatacacagaaaatcgcaagaatcccaatccttcacaatccaactcatcagaggtcataccttagtagagctctacttgcagtgtggagaggaattgtattgtctcatcttcatatgctacatacggataagccatcagagtgtccagatgacaactttggtacaggtgctgaacatcttctaacaatccgagttgtgcaagtgaggtcgagcaaggatacctcgtgctacagaactcattcagcttgaaaagcctaacatattcctcagcaggcaatatgttgggcttgtgcagaagtttggtagctctgcgagtctgttcaggcatgtactcgtcttccagatcttcgtctataagctcatacctctctgtcatcgctctctttcctcgggctatctcagctttccttctgaaactttcgtattctctctgttctctctctggccttgaagatgacgattctgtctcatccatgttgtagtcaggatcaacagaagaactgccactgtaattgctcatgattctcctgtagggatttagaactcaaagctgaaatgtcaataggttagtctcaaagatagcaatgaaaccaaaattattgtcaataggcaatgaaacagattgaattggtcgagtacaattctgtactcgagtaacctgagctgtttctgagcttagatgaattgaatcgagtatcttctcacaggtcgagttggaatgctacagccggtcgagtgaatcgtggagatagagtgaatcgtgaaagctagtggtcgagtagcttctctgaagttggaaggctctactgaattcacgaacaagaagccgagtagaattttgcaggggtcgagtgctttcacgaggtcgagtgagtttttgaagtcggctaggacggcgtcagtcgagtgcctctacgagaccgggaagcgaggtcgagcgattttttatgaaagagacggcggttgatgtggatgaattggtcgagtatacagaaggaatcgagtgaagtggtttggtcgggtgacggagggaatgagctggtgacggcggctaggtggtcgagtgaaattatcagaggtcgagtagctgtttggacggcgatttgtggagtagggagattagagtgtcggcggtgaaatgaaaagaggaaggtcgagtggatttggagtggtcgagtagcgcttcaaaatgagtggtctaggttgaattttagattctctctccagcttatcctcagcgcgtggtccacacactgttgattgagaaaattttgcagaaaacctactgtaaactataggaaatttctgcaagtctctgtagcttctgttggtcgagtaaaatgatgatttaaaaatttttgggttttaaacatcacacatactcgaccaatgtactcgagtgcaaggtctccaggtgcaacagaagattttcaaaattttgtactccaacgggctgtacactcgatctccaggtcttctgtagagtaaatgttttgaatttttactctatctccgcgttgttctcttgtctctgaaaaccacaaacacaactaaaacaaatcaaaaatatcaagaaagtaaaaattatttacaaggatagtcatgggacttcctcccaagtgagcttgtttaaagtcattagcttgactcctttactcctttgatcatcaagaagctcctggagatgaaccgatgtcaactctggaaggatttggtttgctaagtatttcttgagcctttgaccatttactgtaaaatctccactcttaccagctagagtgactgctccataaggacggacctcagtgatgcagaaggggccagaccatctggatttaagttttcctggaaagagtttcaagcgagagttgaatagcagcacctgatcaccaacctggaaatccttagtgatgatcttcttgtcatggaaaagcttggttctctccttgtagattttagaactttcataagcttctagacggatctcatcgaggtcactgagttggatcaatcgcttctcctcagcagtttttatgtcaaagttcagaagttttaccgcccacattgctttgtactcgagctcaacgggtagatgacatgattttccatagagaagattgaaaggagttgtacctatgggggtcttgaaggctgtcctgtaagcccataatgcatcatctagctttgcagaccagtctttccttgtaatcccaacagtcttttccagaattgtttttatctccttattggagatctcaacctgcccgcttgtctgtggatgataaggagtggcgaccttgtgctttaccccatgcttcttcaagaggttctcaaaaaccttgttgatgaaatgctttccgccatcactgattactaccctgggaactccaaatcttgggaagattatggttttgaacaacttcagcacaacttttgcatcgttggtaggactagcaatagcttcgacccactttgatacgtagtctacggcgaccagtatatatttattaccgtatgaagatgggaatggacccataaaatcaatcccccatacatcaaagatctcaacttccaagattggattctgaggcatctcatttcttctgccgatgttgccttttctctggcatgaatcacactttgatacaaactcctgagcgtccttaaacattgttggccaccaaaagcctgcttgaagaatcttggacactgtcttgaacgtcgcgaagtgaccaccatatgctgagccatggcaatgcagcaggataccttccacttcatcttctgagacacatctcctgtagatcttatcttcacagagagtgtaaagataaggctcatcccagtagtaatggtgtatgtctctgaaaaacttcttcctttcataacttgtcaggttgggaggctctactctgcatgccaagtaattgacgtgatcagcataccatggagattctccttcaacagcatttaactggtggaactctttcccactgtagctttttccgaagaactctataaccatgagctgttcttctggcattgaatcgtctatcggaagtggttcttcaattctcatccttgacagatggtccgctgcgccattttcaatgcctttcttatctactatctccatgtcaaactcttgcaataaaagtttccatcttaacagtcttggtttagtatccttcttggcatacagatgcctcaaagctgcatggtctgtatagacagttacctttgatccaaccaaatagcttctgaacttttcaaatgcgaatacaacagctagaagctccttctcagttgttgcatatcttccctgagcgtcatccaacattcggctggcgtaatatatgacatgaagcttcttgtttattttctggcctaaaacagctcctactgcgtaatccgatgcatcacacatgatttcaaatggatagtcccaattaggcgctcgaacgaccggagcagataccaaagcgtccttgatggtttgaaaggatttgaggcagtcatcatcgaattcaaattcggtttccttgcacaatagtctggttaacggtcgggctatcttggagaagtctttaatgaatcttctatagaatccagcatgaccaaggaagcttctgatgtccttcaccgtttttggtggctgcagctgcatcattacttcaacttttcctttgtcaacctctatacctttctctgatatcttgtgacccaatactatgccttccttcaccatgaaatgacacttttcccaattgagaacaagattcgtctcctcgcacctggtcaataccctgccaagattcaacaaacatgaggagaaagaggggccatagaccgaaaaattgtccatgaaaacctccaccatctcctcaattaagtctgaaaatatagaggtcatacacctctgaaatgttgcaggagcattgcataaaccaaatggcattctcttataggcaaaagttccataaggacacgtgaaagtggttttttcttgatcattagggtgaattggtatttgaaagaaaccactgtatccatcaagaaagcaataatatggatgattagctaatcgttcaagcatttggtcaatgaatggtaaaggaaaatgatctttcctagatgcagcattcaacttcctataatctatgcacattctatgaccagttatagttgtagtaggtatcagttcatctttttcatttttgacaacagtcattccaccctttttagggacgcaatgcactggagaaacccaagtactatcagagatagggtagatgacaccagcatcaagcagtttcaaaatttcttttttcactacttctttcaaattgggatttaacctcctctgtggttcaatgctggaataggattcgttttcaagatggatcctatggttgcataaactaggtgaaattcccttaatgtcggataatgaataaccaattgctctcctatactttctaacctcagataatagcaggttcacttcatcactatttaactcagcattaatgatcacagggtaagtagagtttggaccaaggaatgcgtaccttagaacttttggaagtggtttgagatcaaccttcggtgccttaagttcagaccagtcatctgaagttggaatgatcggctccctaggttcgtcggaagacaaggtcgagtggttgcttgagtacgtcctcgagagtgcaggatgaactcgagttgacccttcttcgctcattaccattacctctgttcctggtccatttaattcctcaaagggttctgattcttccatcgctttatgggagtctaacagcttctggtatcccaatgtttctaaatgcagaacccatcttcaccacttttggttaaagcactgttaagatgatcttcttctgccacctcttccagtaactcatcagctaactgatccatttcttcgatccaaaagagttgcccttctatggtaggcttcttcatcgcgtctttgacatcaaaggtcatcctaaagtctttgccaaggtttagatcaattttccctttcttgacatcaatcatagctcctgcagtggctaagaaaggtctccctagaatcaacgggtccttgggctcttcatccatctccaggactacgaagtcagtaggtatctccacagcaccgatcctgattgggaggttttcgagcaaaccatgaagaatcctcactgatctgtcagctaggatgagggatatattgcaggacttgtattgagtgaaccccaatcttttggcgacagaaagcggcatgagactgactgatgctcctaaatcgcattggcatctattgaaagccaatggacctaaagagcacggtagagtgaacgaaccaggatcactaagcttcttaggaatgatcttcttctgtatgatagcgctgcattcatgactcaataccaccatctcttgcacttcttgaattctctccacaatcaagtctttcagaaacttgtgagagtctggaattagcgctagagcgtcaacaagaggtatccgcaactcaacctccttaatgttcttggcaaacatagctctatatttgtctgccaacgctttcttgtgacggccaggaaatggaagctgcggtttgtagggaggagggacaaagaccttttctttgtttttgacagcaactggctttggagcagttggtgatgctgctgggatgacaggtcgagtggtcggtcaagtaacgctgtcgagtggcagctcgagtggttgctcgagtgactggtcgagtggtttgtcagcttgatctttctcgagacttaaatccttcccatcttgatcttcactgtcctcagtgaccgtgtttggttcctccctagttggaagtgcttttccactacgcaaggtgatagcatgagcatattcttttggattctgaactgctttgcctagtagttggcttgtctgttttggagctgaagaagatgcacaatgtccctctaagtaacggactttggtattcagtgtttccatcttgacattgagatcattgtagctacagtccagcttgttatgtaactcagatatcttctttgccatctccatggagccagaggcttgcccgtgaagtagctgttgtagcatttgtagcatttgtttcatatcagcgtgaggagcagcaggaccttggttttgctgaggtgcaaacccaggtggtggtggttgctggtagttcccctggaattgctgcttaggaacgaaaccttggttgtagggaacaaaaggtttgttctgaccttgttgttgctatggagggtacacctgatcctgaggattagcaacgtttgtgctgcggtaggagaggttgggattgttggttttgaagttgttgtatcctttgtagccaccttggttgttgttgatgtagctgacttcttccaactggttaccctccccatcttggacttcatactgctcgtcatcaacaaggaagtgcacatgcttatgctggctaagaagaatcctgtccagcttgtcattcagcgctttgatctccttcctgtgtttgtcatcagagtcagctgttcctctaacggtcctatcacagtcctcgttgtaattgccatctgattgagccaagttctcaaccaattctcagccttcttcaacatccttgttctggaaattcccattgctggcggtatgcagaagcattctgatgcgtggtaggactcctctgtaaagagtgctgagaagagaggctttagtaaagccatgatgagggcattggttggtgtaacccttgaaacgctcccatgcttcacagaagctttcaccagtcttctgtgagaaaccagaaatctcatttctgagtcttgcagttttggcattggagaagaactttgacagaaaagccttcttacaatcatcctaggtggtgattgagtcatggggcagattcttctcccagatatgtgctttgtcgcccaaggagaatggaaacaaacggagcttgaatccgttttcactgacaccattgatcttcgttaggttgcagagcctatcgaattcatcaaggtggtcgagtggatcctccattggcaaaccatggaatttgttcccctgaatcatcgagatgagacaactcttaatctcaaaattgttgttctggatagcaggaggtgcaattcccttcctctaacggtgatcacgtggtgcatctccagcaccaatgttggcatggccattttgttgattctgttcttcagccataacgagtggttgctgaggtacagggttgactgtggttctcctttttctgagttcgcgggctgtgcggttgatgttatcgttgaaaagaaggttctggttgcctattgatcgagttcgcatacagcagaggtgtacctaaatcaagaagacaacaagaaaaacacagtaagtaactgaaaagaaaattgaaaaagaacttgatctaagcaagtctgaaatcttaaatgtaacaaacaaacacccaattggcaacggcgccaaattgataataggtttttagtcaattatcctaaaacaccaatcatgtcattgtagtattttaggttgtcaatccaaatgggtgtgatgcttacaatcaagatgtgatcagaagtcactaagtcaagccaagcataacaggttttggtgtgttccagcagtcctaagtgaacatgcagaaaacagaaaatcaaacagaaacagtaaaacactcgaccaacacagctctttgcagagttctgggggaggtcgagtgacaggtcgagtaacagacaggaaatgaaacagggatactcgactgcacagtctgttgccagacaactgggtggtcgagtatcagatcgagtaacagtaaagaattgcagaaactaagcaacagatgacaatatgcagtaaacagtagtagagtaaacaataaaatcaatcagataaagaattcctaaggatgggataattgagtagtttcgtttcctcagtttacaggtgattgacatgctcaataaattaaccctagacaacaagttcattaaccaaatctaagtgccaccgcaacagagactctcaagctaacctagtcccagactcaatcaccattgacgagagctaacctaacaggcattacgaatcaacaagttaaagccaaaacgctctctgcaaccaataccttggtacagggtcacgaatctctggaattagtggttcagacatttcatcgaacaccttttgggcgcggaaatgtctgggctcaaattccagttgatcagaaagcaataggcattaagaacaactaatccagaagggatctatcaatcaatactcaatcacctagcatactgagaattctacactactctaacccatcctcagaaacctattcactacttagacatcataacagaaagcataaacgttgaacaggttgaagacatgataacaacagtgtaacagtagtgtgataacagaatgaacaacagtaaacgaaaatcaagaaccaaagctgaatactgaatagataaagagaaatctggattataaaaagtctagaacacaaggtatgcggaaataaaactaggtaaaaacttcttttctgcgaaaatgagaagtacatgctacttatagccaaatatcccgaaaccctaacactcaaaacgacgaagtatttggacgggttaagaactgtactcgacccaggtggtcgagtgagaggtcgagtgaatagctggagtcttcttttcctccttgtgctcgagtgtctggttgagtgcagaatgaagaaggctctgaagcttgtcatcgagtatgcagtcgagtggtgtgatggaggtactcgacctctaggaagagtgatgtggtcgagtagtggtctggcagtgaaggtgaagacactcgacctcatggtcgagtgaagtgatcgagtgatggagacgagggcactcgacctcgtgttcgagtggtgaagtgaagtggtgatgtcctctgctcgacctgggggtcgagtggtctcttgaggtcttgaagctcctactcgacctctgggtcgagtggtttgtcacgatcaggtccgcttcttcctgatagctcgtcaacagctccaaatcacctgaaatcaacgcaaatatgcaacatgcatgcaaaactatcctaaacatgcaaagtgatgacaaatgatgtgaaatggtataaaacagtgatgatatgatgctaaagtgatgacaaatggatgctcaaaacatgcaaaatacacacttatcaggctacaccatcaaatctttgagaagcaagaagaatattggttagtgttttggagtgaaatatgactagatgtcatgtgtatgagtaagtataacaactagaatcacaaccatatcttaaaagcctaagtattgtatccttgttagaagatacaaagacaaagactcatagagacttcgcctacaccatcaaagctttgagaagcaagaagaagcttgttagcgttttgtgatcaaaaatgacttgatgagatctgtatgattgagtagaagaacttaaaccgcaactggatcttaaaagcctaagtagtgtttccttgttagaagatacaaagccaaagtctcatacgaactttagctacacaatcaaagcgttgagaagcaagaagaagcttggttagtgttttagagttaaatattactagatgtcatgtgtattagtgagtataacaactagaaccgcatccagattttaaaagcataagtattgtatccttgttagaagatataaagacaaagactcatacggacttcggttacactatcaaagctttgagaatagagaagaagcttggttagtgtgttggagtcgaatataacttgatgtcatgtgttttattgagtataacaacttaaactgcaaccggatcttaaaagcctaagtagtgtttccttgttagaagatacaaagctgaagactcatacggagtttagctacaccatcaaagcattgagaagtagaagcagcttggttagtgttttggagtcaaatacgacttgatgtcatgtgtttgagtgaatataacaagtagaaccgctaggtgatcttaaaagccaagtattgtatccttgttaaaagatacaaagacaaagacgcatacagacttcggctacaccatcaaagctttgagaacaaagaagaagcttggttagtgttttggagtcgaatatgacttgatgtcatgtgtatgattgagtataagaacttaaaccgcaatcagatcttaaaagcctaagtagtgtttccttgttagaagatacaaagtcaaagactcatacgtagtttagctacaccatcaaagctttgagaagcaagaagaagcttggttagtgtttaggagtcaaatatgacttgatatcatgtgtatgactgagtataacaactagaaccgcaaccggatcttaaaagcctatgtattgtatccttgttagaagatacaaagacaaagactcatatggacttcggctacaccatcaaatctttgagaagcaagaagaatattggttagtgttttggagtgaaatatgactagatgtcatgtgtatgagtaagtataacaactagaatcacaaccatatcttaaaagcctaagtattgtatccttgttagaagatacaaagacaaagactcatagagacttcgcctacaccatcaaagctttgagaagcaagaagaagcttgttagtgttttgtgatcaaaaatgacttgatgagatctatatgattgagtagaagaacttaaactacaactggatcttaaaagcctaagtagtgtttccttgttagaagatacaaagccaaagtctcatacgaactttagctacacaatcaaagcgttgagaagcaagaagaagcttggttagtgttttagagtcaaatattactagatgtcatgtgtatgagtgagtataacaactagaaccgcatccagattttaaaagcataagtattgtatccttgttagaagatacaaagacaaagactcatacggacttcagctacaccatcaaagctttgagaagcaggatgaagcttggttagtgttttggagtcaaatatgacttgatgtgatgtgtatgattgagtataagaacttaaaccgcaacccaagcttaaaagcctaagtagtatttcattgttagaagatacaaagccaaagcctcatacggactttagctacaccatcaaagctttgagaagccagaagaagcttggttagtgttttggagtcaatattattagatgtcatgtgtatgagtgagtatgacaaatagaaccccaaccggatcttaaaagccttagtattgaatctttgttagaagatactaagacaaagactcatacggacttcggctacaccttcaaagctttgagaagcaagaagaagcttgcttagtgttttggagtcaaatatgacttgatgtaatgtgtatgagtgagtataacaactagaatcgcaaccagatctgaaaagcctaagtattgtatccttcttagaagatataaagccaaagcctcatacggactttagctacaccatcaaagcttttgagaagcaagaagaagcttagttagttttttggagtcaaatattactagatgttatgtgtaagagtgagtatgcagctagtacagcaaccggatcttaaaaacctaagtattgaatctttgttagaagatacaaagacaaagacttatatagacttcggctacaccatcaaagctttgagaagcaagaagaagcttggttattgttttggagtcgaatatgacttgatgtcatgtgtatgattcagtaaaagaacttaaaccgcaaccggatcttaaaagcctaagtagtgtttccttgttagaagatacaaagccaaagactcatacggacttcatttacaccatcaaagctttgagaagcaagaagaggcttggttaatgttgtggagtcaaatatgactagatgtcatgtatatgaatgagtataacaactagaaccgcaaccggattttaaaacctaagtattgtatccttggttagtgttttggattcaaatatgagttgatgtgatgtgtatgattgagtataagaacttaaaccgcaactggagctttagtgcctcagtagtgtttcctcgttagaagatacaaaggcaaagactcatacggagtttagctacaccatcaaagctttaagaagcaagaagaagcttggttagtgttttggagtcaaatacgactagatttcatgtgtatgagtgagtataatacctagaaccgcaacctgatcttaaaagcctaagtattgtatccttgttaaaagatataaagacaaagactcatactgacttcggttacaccatcaaagctttgagaataaataagaagcttggttagtgttttggaggcgaatataacttgatgtcatgtgtatgattgagtataagaacttaaactgcaactggatcttaaaggcctaagtagtgtttccttgttagaagatacaaagccgaagactcatacggagtttagctataccatcaaagcattgagaagtataagaagcttggttagttttttggagtcaaatacgactagatgtcatgtgtatgagtgagtataacaactagaaccgcctgctgatcttaaaagcctaagtattgtatccttgttaaaaaatacaaagacaaagccgcatacgaacttccgctacaccatcaaagctttgagaacaaagaagaaggttggttagtgttttggagtcgaatatgacttgatgtcatgtgtatgattgagtataagaacttaaaccgcaatcagatcttaaaagcttaagtagtgtttccttgttagaagatacaaagtcaaagactcatacgtagtttagctacaccatcaaagctttgagaagcaagaagaagcttggttagtgtttaggagtcaaatatgacttgatgtcatgtgtatgactgagtataacaactagaaccgcaaccggatcttaaaagcctatatattgtatccttgttagaagatacaaagacaaagactcatatggacttcggctacaccatcaaatctttgagaagcaagaagaatattggttagtgttttggagtgaaatatgactagatgtcatgtgtatgagtaagtataacaactagaatcacaaccatatcttaaaagcctaagtattgtatccttgttaaaagatacaaagacaaagactcatagagacttcgcctacaccatcaaagctttgagaagcaagaagaagcttgttagtgttttggaggcgaatataacttgatgtcatgtgtatgattgagtataagaacttaaactgcaactggatcttaaaggcctaagtagtgtttccttgttagaagatacaaagccgaagactcatacggagtttagctataccatcaaagcattgagaagtataagaagcttgttaagttttttggagtcaaatacgactagatgtcatgtgtatgagtgagtataacaactagaaccgcctgctgatcttaaaagcttaagtattgtatccttgttaaaaaatacaaagacaaagccgcatacgaacttccgctacaccatcaaagctttatgaacaaagaagaagcttggttagtgttttgaagtcgaatatgacttgatgtcatgtgtatgattgagtataagaacttaaactgcaaccggatcttaaaagcctaagtagtgtttccttgttaaaagatacaaagccaaagactcatacggacttcatctacaccatcaaagctttgagaggcaagaagaggcttggttagtcttgtggagtcaaatatgactagatgtcatgtgtatgagtgagtataacaactagaaccgcaaccggattttaaaagcctaagtattgcatccttgttagaagatacaaagacaaagactcatacggacttcgggtacaccatcaaagctttgagaagcaagaagaagcttggttagtgttttggagtcaaaattgttatgtgtatgattgagaataagaacttaaaccggaacccgagcttattagcctaagtagtattttcttgttagaagatacaaagacaaagacacatacggactttgactacacaatcaaagctttaaaaagcaagaagaagcttggttagtgttttggagtcaaatatgacttgatgtcatgtgtatgattgagtataacaactagaaccgtaatcggatcttaaaagcctaaatagtgttttcttgttagtagatacaaagacaatgactcatacggagtttagcaacaccataaaagctttgagaagcaagaagaagcttgtttagtgttttagagtcaaatattactagatgtcatgtgtaagagcaggtatgacaactagaaccgcaatcggattttaaaagccaaggtattaaatctttgttagaagatacaaagacaaagactcatacgaacttataataggtttttagtcaattatcctaaaacaccaatcatgtcgttgtagtattttaggtgtcaatccaaatgagtgtgatgcaaacagatgagatgtgatcagaagtcactaagtcaagccaagcaataacagttttggggtttttaaaagtcctaagtgaacatgtagaaaacagaaacaataacagaattactaaaatcactcgacaacaacaggctgatgccagaagtaggatgtggtcgagtaacaggcaggatatgaaacagatatactcgacagcacagtctgttgccagacactgggtgtggtcgagtatactggtcgagtaacagacaggaaatgagacaactgtactcgactgcacagtctgttgccagacactgggtgtggtcgagtaagttggtcgagtaagttggtcgagtaattgcaaaaactaagaaacaggcaatgagaacgattaagcgataacgataaaacagagaaatcagatagacgagaaattcctaaggatggggtaatcaaataaagtggtatcctagcctattcgaatggttaacaagcgcaatcaagctatccctagacaacaggttcaacaacagatcaattcactccagtgatagaaatcctcaatcaaagctagcccagactaattcccattaacggaatctaactatgcaggcaataagaacagactgataaagtcaataaacgctctaaacggccaatcccttgggatagagacgaatatctcaggaactagtggatcaaacattccatcgaacatcttctgggtgcgggaatgcttgggatcgaattcaagttgatcagaaagaaataagcagtaaacacaactagtcctgaagggattcaatcaattctaaaacttaaccattctacagactacggattccacaactactctatcccatccctaagaattctaagtcactactcagacaacatgctcaaagacataaacgcagataaatgataatattgcataagtaaagagataaagagtagagaaacaagatgacagatgaaatcaaatgcagaatctgaataacttagaaaaatctcgaattacaggttgcagaagcaaaagcggcgcagcagagtaaaacaaaaaacaaaactgaagcaaaaacgcaatgtcgactagatgtctcaggacagaaccctaagacatctatttatacaaaacgaaataaaatgatagtaaacgggtcaataacctaatcgcctggcccatagaaagataatgggccgagatgggcttcgtgatccgatggaggtccaggccgcttccaaacactttgtcttctcctcttctcttccttgtgctcagcttgtctggttgtgtgcggatttgagtagattgtgaagacgtgatcgagtgtccggtcgagtgatggtgatggtggtaagtgatgatactcgaccagggggtcgagtatcttggtagagtgaatggtcgagtgtggtcaggtggtgtggcgaagtgatactcgaccagggggtcgagtaatgtggtagagtgaacggtcgagtattgtcaggtggtgtggcgaagtgatactcgaccagggggtcgagtggtgtcatcgagtggcctgagctgaggttactcgacctggtggtcgagtagatgggaagaatggctccaaagtcactcgaccagagggtcgagtatggtgctggatgcacacgacctggtggtcgagtatgtcttctggttctggctcgtttcttccaatttgttcgcaaacagctccaaatcacctgaaaacaactcagaaatgcaatatgtatgcaaagctatcctaatcatgcaaagtatgtaagaatgatgagaaatgatataaaacagtgatgaatgatacgaaactggactcaaaactatgatgaatggacactgaaaacatgcaaattatagacatatcacggacttcggcgacaccatcaaagctttgagaagccagaagaaatttgattagtgttttaaagtcaaatatgacttaatgtcatgtgtatgattgattataagaatttaaccgcaaccggatcttaaaagcctaagtagtgtttttttgttagtagatacaaagacaaagacacagacggacttcagctacaccatcaaagctttgagaagcaagaagaagcttggttagtgttttggagtcaaatgttaatagatgtcatgtgtaagagtgagtataataactagaactgaaccagatcttaaaagcctaagtattgaatcttggttagaagatacaaagacaaagactcatacgaacttccgctacaccatcaaagctttgagaagcaagaagaagcttggttagtgttttgaagtcgaatatgacttgatatcatgtgtatgattgagtataagaacttaaaaccgcaacagaatctttaaagactaagtagtgtttccttgttcgaagatacaaagcgaaagcctcatacgtactttagctaccccatcaaagctttgagaagcaagaagaagcttggttagtgttgtggagtcaaatatgactagatgttatgtgtatgagtgagtataacaaatagaaccgcaaccggattttaaaagcctaagtattgtatccttgttagaagatacaaagacaaagactcataaggacttcggctacaccatcaaagctttgagaagcaaaaagaagcttggttagtgttttggagtcgaatatgacttgaatatgtgtatgattgagtataatcacttaaattacaacccgagcttaaaagcctaagtagtatttccttgttagaagatagaaagccaaagccacttacgcactttagctacaccatcaaagctttgagaagcaagaagaagcttggttagtgttttggagtcaatattactagatgtcatgtgtatgagtgagtattacaaatagaaccgcaaccggatcttaaaagcctaagtattgaatctttgttagaagatacaaagacaaagactcatacgaacttcggctacaccatcaaagctttgagaagtaagaagaagcttggttagtgttttggagttagactagatgtcatatgtatgagtgagtataacaactagaattgcaaccagatcttaaaagcataagtattgtatccttcttagaagatacaaagacaaagactcatacggactttgactacacaatcaaagctttgagaagccagaagaagcttggttagtgttttggagtcaaatatgacttgatgtcatgggtatgattgattataacaactagaaccttaaccggatcttaaaagcctaagtagtgttttcttgttagtagatacaaagacaaagactcatacggagtttagctacaccataaaagctttgagaagcaagaataagcttggttagtgttttgtagtcaaatatgactagatgtcatgtgtatgagtgagtataacaactagaaccgcaacctgatcttaaaagcctatgtattgtacccttgttagaagatacaaagacaaagactcatacgaacttcaactatatcatcaatgctttgagaagcaagaagaaccttggttagtgttttggagtcaaatataaattgatgtcatgtgtatgattgagtataagaacttaaaccgcaactggatcttaaaagcctaagtagtgttttcttgttagtagatacaaagacaaacactcatacggagtatagctacagcataaaagctttgagaagcaagaataagcttggtttgtgttttggagtcaaatatgactagatgtcatgtgtatgagtgagtataacaactagaaccgcaaccggatcttaaaagcctaagtattgtgtccttgttagaagatacaaagacaaagactcatacggacttcggctacaccatcaaagctttgagaagcaagaagaagcttggttagtgttttgtagtcaaatatgacttgattttatgtttatgattgagtataagaacataaaccgcaaccggatcttaaaagcctaagtagtgtttccttgtcaatagatacaaagacaacgacgcatactgacttcagctacaccatcaaagctttgagaagcaagaagaagcttggttaatgttttggagtcaaatatgagtagatatcatgtgtatgagtgagtataacaactagtaccgcaaacatatcttaaaagcctaagtattatatccttgttagatgatacaaatacaaatactcatatggacttcggctacaccatcaaagctttgagaagcaagaacaagcattgttagtgttttggagtcaaatatgactagatgtcatgtgtatgagtgtgtataactactagaatcgcaaccagatcttaaaagcctaagtattgtgtccttgttagaagatacaaagacaaagactcgtacggacttcggctacaccatcaaagctttgagaagcaagaagaagcttggttagtgttttgtagtgaaatatgacttgattttatgtttatgattgagtataagaacataaaccgtaaccggatcttaaaagcctaagtagtgttgccttgttaatagatacaaagacaacgacgcatactgacttcagctacaccatcaaagctttgagaagcaagaagaggcttggttaatgttttggagtcaaatatgactagatgtcatgtgtatgagtgagtataacaactagcaccgcaaacatatcttaaaagcctaagtattgtatccttgttggaagatacaaagaccaagactcatacggacttccgctacacaatcaaagcttcgagaatcaagaagaagcttggttagtgttttggagtagagtatgactttatgtcatgtggacgattgagtataagaacttaaactgcaaccggatcttaaaagcctaagtattgtatccttgttagaagatacaaagacaaagactcctacggacttgctacaccatcaaaagtttgagaatcaagaagaagcttcgttagtgttttggagtcgaatatgacttgatgtgatgtgtatcattgagtataagaacttaaaccgcaaccagatcttaaaagcctaagtagtgtttccttgttcgaagatacaaagccaaagcctcatacgtactttagctacaccatcaaagctttgagaagcaagaagaagcttggttggtgttgtggagtcaaatatgactagatgtcatgtgtatgagtgagtataacaaatagaactgcaaccagattttaaaagcctaagtattgtatccttgttagaagatacaaagacaatgactcataaggactttggctacaccatgaaagctttgagaagcaagaagaagcttggttagtgttttggagtcgaatatgacttgatgcgatgtgtatgattgagtataagaacttaaaccgcaacccgagcttaaaatccaaagtagtatttccttgttagaagatagaaagccaaagacacatacgcacttaagctacaccatcataactttgagaagcaagaagaagcttggttagtgttttggagtcaatattactagatgtcatgtgtatgagtgagtatgagaaatagaaccgcaaccggatcttaaaagcctaagtattgagtatttgttagaagatacaaagacaaagagtcatacggacttcggctacaccatcaaagctttgagaagtaagaagaagtttgcttagtgtttcggagtcaaatatgacttgatgtcatgtatatgattgacaataacaactagaaccgtaaccggatcttaaaagcgtaagtagggttttcttgttagtagatacaaagacaaagactcatacggagtttagctacaccataaaagctttgagaagcaagaataagcttggttagtgttttggagtcaaatatgactagatgtcatgtgtatgagtgagtataacaagcagaacctcaacctgatcttaaaagcctatgtattgttcccttgttagaagatacaaagacaaagactcatacggaattcgactacaccatcaatgttttgagaagcaagaagaagcttggttagtgttttggagtcaaatataaattgatgtcatgtgtatgattgagtataagaacttaaaccgcaaccggatcttaaaagcctaagtagtgttttcttgttagtagatacaaagacaaagactcatacggacttcagctacaccatcaaagctttgagaaagaagaagcggcttggttagtgttttggagtagaatatgactttatgtcatgtggacgattgagtataagaacttaaactgcaaccggatcttaaaagcctaagtattgtatccttgttagaagatacaaagacaaagactcctacggacttgctacaccatcaaaagtttgagaatcaagaagaagcttcgttagtgttttggagtcgaatatgacttgatgtgatgtgtatcattgagtataagaacttaaaccgcaaccggatcttaaaagcctaagtagtgtttccttgttcgaagatacaaagccaaagcctcatacgtactttagctacaccatcaaagctttgagaagcaagaagaagcttggttggtgttgtggagtcaaatatgactagatgtcatgtgtatgagtgagtataacaaatagaactgcaaccagattttaaaagcctaagtattgtatccttgttagaagatacaaagacaatgactcataaggtctttggctacaccatcaaagctttgagaagcaagaagaagcttggttagtgttttggagtcgaatatgacttgatgcgatgtgtatgattgagtataagaacttaaaccgcaacccgagcttaaaatccaaagtagtatttccttgttagaagatagaaagccaaagacacatacgcacttaagctacaccatcataactttgagaagcaagaagaagcttggttagtgttttggagtcaatattactagatgtcatgtgtatgagtgagtatgagaaatagaaccgcaaccggatcttaaaagcctaagtattgagtatttgttagaagatacaaagacaaagactcatacggacttcggctacaccatcaaagctttgagaagtaagaagaagtttggttagtgtttcggagtcaaatatgacttgatgtcatgtatatgactgattataacaactagaaccgtaaccggatcttaaaagcgtaagtagggttttcttgttagtaaatacaaagacaaagactcatacggagtttagctacaccataaaagctttgagaagcaagaataagcttggttagtgttttggagtcaaatatgactagatgtcatgtgtatgagtgagtataacaagcagaacctcaacctgatcttaaaagcctatgtattgttcccttgttagaagatacaaagacaaagactcatatgaaattcgactacaccatcaatgttttgagaagcaagaagaagcttggttagtgttttggagtcaaatataaattgatgtcatgtgtatgattgagtataagaacttaaaccgcaaccggatcttaaaagcctaagtagtgttttcttgttagtagatacaaagacaaagactcatacggacttcagctacaccatcaaagctttgagaaagaagaagcggcttggttagtgttttggagtagaatatgactttatgtcatgtggatgattgagtataagaacttaaactgcaaccggatcttaaaagcctaagtattgtatccttgttagaagatacaaagacaaagactcctacggacttccgctacaccatctaacgtttgagaatcaagaaaaagcttcgttagtgttttgaagtcgaatatgacttgatgtgatgtgtatgattgagtataagaacttaaaccgcaaccggatcttaaaaccctaagtagtgtttccttgttcgaagatacaaagccaaagcctcatacgtactttagctacaccatcaaagctttgagaagcaagaagaagtttggttggtgttgtggagtcaaatatgactagatgtcatgtgtatgagtgagtataacaaatagaactgcaaccagattttaaaagcctaagtattgtatccttgttagaagatacaaagacaaagactcataaggactttggctacaccatcaaagctttgagaagcaagaagaagcttggttagtgttttggagtcgaatatgacttgatgcgatgtgtatgattgagtataagaacttaaaccgcaacccgagtttaaaatccaaagtagtatttccttgttagaagatagaaagccaaagacacatacgcacttaagctacaccatcataactttgagaagcaagaagaagcttggttagtgttttggagtcaatattactagatgtcatgtgtatgagtgagtatgagaaatagaaccgcaaccggatcttaaaagcctaagtattgagtatttgttagaagatacaaagacaaagactcatacggacttcggctacaccatcaaagctttgagaagtaagaagaagttttgttagtgttttggagtcaaatatgacttgatgtcatgtatatgattgattataacaactagaaccgtaaccggatcttaaaagcgtaagtagggttttcttgttagtagatacaaagacaaagactcatacggagtttagctacaccataaaagctttaagaagcaagaataagcttggttagttttttggagtcaaatatgactaaatgtcatgtgtatgagtgagtataagaagtagaagcgcaacttgatcttaaaagcctatgtattgtatccttgttggaagatacaatgacaaagactcatacggacttccgctacacaattaaagcttcgagaatcaagaagaagcttggttagtgttttggagtagaatatgactttatgtcatgtggatgattgagtataagaacttaaactgcaaccggatcttaaaagcctaagtagggttgccttgttagaagatacaaagccaaagacttatacggagtttagctacaccatcaaagctttgagaagcaagatgaagcatggttagtgttttggagtcaaatatgacttgatgtcatgtgtatgagtgagtataacaactagaaccgcaatcggatcttaaatgcctaagtattgtgtccttgttagaagatacaaagacaaagactcatccggacttcggctacaccatcaaagctttgagaagcaagaagaagcttggttagtgttttttagtcaaatatgacttgattttatgtttatgattgagtataagaacttaaacagcaacctgatcttaaaagcctaagtagtgtttccttgttagtagatacaaagacaacgacacaatctgacttcagctacaccatcaaagctttgagaagcaagaagaggcttggttagtgttttggaatcaaatatgactaaatgtcatgtgtatgagtgagtataacaactagaaccacaaccgcatcttaaaaacctaagtattatatccttgttagattatacaatacaaagactcatatggccttcggctacaccatcaaagctttgagaagcaagaacaaacattgttagtgttttggagttaaatatgactagatatcatgtgtatgagtgagtataacaactagaatctcaacaagatcttaaaagcctaagtattgtatccttgttagaagatacaaagacaaaactcatacggacttccgctacaccatcaaagctttgagaatcaagaagaagcttggttagtgttttggggtcgaatatgacttgatgtgatgtgtttgattgagtataagaacttaaaccgcaaccggatcttaaaagtctaagtagtgtttccgtgttcgaagatacaaagccaaagcatcatacgtattttagctacaccatcaaagctttgaaaagcaaaaagaagcttggttagtgttttgaagtcaaatgttactagatgtcatttgtaagagtgagtataacaactagaaccaaaccagatcttaaaagcctaagtattgaatctttgttagaagatacaaagacaaagactcatacagacttccactacaccaataaagctttgagaagcaagaagaagcttggttagtgttttgaagtagaatatgactttatgtcatatggatgattgagtataagaacttaaaccgcaaccggatcttaaaagcctaagtattgtatccatgttagaagatacaaagacaaagactcatacggacttccactacaccatcaaagctttgaaaatcaagaagaagcttggttagtgttttggggtcgaatatgacttgatgtgatgtgtatgattgagtataaaaacttaaaccgcaaccggatcttaaaagcctaagtagtgtttccttgttcgaagatacaaagccaaagcctcatacgtactttagctacaccatcaaagctttgagaagcaagaataagcttggttagtgttttggagtcaaatatgactagatgtcatgtgtatgagtgagtataacaagtagaagcgcaacctgatcttaaaagcctatgtattgtatccttgttggaagatacaaagacaaagactcatacggacttccgctacacaatcaaagcttcgaaaatcaagaagaagcttggttagtgttttggagtagaatatgactttatgtcatgtggatgattgagtataagaacttaaactgcaaccggatcttaaaaggctaagtattgtatccttgttagaagatacaaagacaaagactcctacggacttccgctacaccatcaaaagtttgagaatcaagaagaagcttcgttagtgttttggagtcgaatatgacttgatgtgatgtgtatcattgagtataagaacttaaaccgcaaccggatcttaaaagcctaagtagtgtttccttgttcgaagatacaaagccaaaacctcatacgtactttagctacaccatcaaagctttgagaagcaagaagaagcttggttgttgttatggagtcaaatatgactagatgtcatgtgtatgagtgagtataacaaatagaactgcaaccggattttaaaagcctaagtattgtatccttgttagaagatacaaagacaaagactcataaggactttggctacaccatcaaagctttgagaagcaagaagaagcttggttagtgttttggagtcgaatatgacttgatgcgatgtgtatgattgagtataagaacttaatccgcaacccgagcttaaaatccaaagtagtatttccttgttagaagatagaaagccaaagacacatacgcacttaagctacaccatcataactttgagaagcaagaagaagcttggttagtgttttggagtcaatattactagatgtcatgtgtatgagtgagtatgagaactagaaccgcaaccggatcttaaaagcctaagtattgagtatttgttagaagatacaaagacaaagactcatacggactttggctacaccatcaaagctttgagaagtaagaaaaagtttggttagtgtttcggagtcaaatatgacttgatgtcatgtatatgattgattataacaactagaactgtaaccggatcttaaaagcgtaagtagggttttcttgttagtagatacaaagacaaagactcatacggagtttagctacaccataaaagctttgagaagcaagaataagcttggttagtgttttggagtcaaatatgactagatgtcatgtgtatgagtgagtataacaagtagaaccgcaacctgatcttaaaagcctatgtatggtacccttgttagaagatacaaagacaaagactcatacggaattcgactacaccatcaatgttttgagaagcaagaagaagcttggttagtgttttggagtcaaatataaattgatgtcatgtgtatgattgagtataagaacttaaaccgcaaccggatcttaaaagcctaagtagtgttttcttgttagtagatacaaagacaaagactcatacggacttcagctacaccatcaaagctttgagaaagaagaagcggcttggttagtgttttggagtcaaatatcactagatgtcatgtgtatgagtgagtataaaaactagaaccgcaacctgatcttagaatcctaagtattgtatccttgttagaagatacaaaggcaaagactcatacggacttcggctacaacatcaaatctttgagaagcaagaagaagcctggttagtgttttcgagtcgaatatgacttgatgtgatgtgtatgattgagtataagaatatgaaccgcacgcagatcttaaaagcctaagtagtgtttcctttttagaagatacaaagccaaagacttatacggagtttagctacaccatcaaagctttgagaagcaagatgaagcatggttagtgttttggagtcaaatatgacttgatgtcatgtgtatgagtgagtataacaactagaaccgcaatcggatcttaaaagcctaagtattgtgtccttgttagaagatacaaagacaaagactcatccggactttggctacaccatcaaagctttgagaagcaagaagaagcttggttagtgttttgtagtcaaatatgacttgattttatgtttatgattgagtataagaacttaaacagcaacctgatcttaaaagcctaagtagtgtttccttgttagtagatacaaagacaacgacacaatctgacttcagctacaccatcaaagctttgagaagcaagaagaggcttggttagtgttttggagtcaaatatgactaaatgtcatgtgtatgagtgagtataacaactagaaccgcaaccgcatcttaaaagcctaagtattatatccttgttagattatacaatacaaagactcatatggccttcagctacaccatcaaaactttgagaagcaagaacaaacattgttagtgttttggagttaaatatgactagatatcatgtgtatgagtgagtataacaactagaatctcaaccagatcttaaaagcctaagtattgtatccttgttagaagatacaaagacaaaactcatacggacttccgctacacaatcaaagctttgagaatcaaaaagaagcttggttagtgttttggggtcgaatatgacttgatgtgatgtgtttgattgagtataagaacttaaaccgcaaccggatcttaaaagtctaagtagtgtttccgtgttcgaagatacaaagccaaagcatcatacgtattttagctacaccatcaaagctttgagaagcaagaagaagcttggttagtgttttgaagtcaaatgttactagatgtcatttgtaagagtgagtataacaactagaaccaaaccagatcttaaaagcctaagtattgaatctttgttagaagatacaaagacaaagactcatacagacttccactacaccaataaagctttgagaagcaagaagaagcttggttagtgttttgaagtagaatatgactttatgtcatgtggatgattgagtataagaacttaaaccgcaaccggatcttaaaagcctaagtattgtatccttgttagaagatacaaagacaaagactcatacggacttccactacaccatcaaagctttgaaaatcaagaagaagcttggttagtgttttggggtcgaatatgacttgatgtgatgtgtatgattgagtataaaaacttaaaccgcaaccggatcttaaaagcctaagtagtgtttccttgttcgaagatacaaagccaaagcctcatacgtactttagctacaccatcaaagctttgagaagcaagaagaagcttggttagtgttttggagtcaaatgttactagatgtcatgtgtaagagtgagtataacaactagaaccgaaccagatcttaaaagcctaagtattgaatctttgttagaagatacaaagacaaagactcatacggacttccgctacaccagcaaagctttgagaagcaagaagaagcttggttagtgttttggagtcgaataggacttgatgtcatgtgtctgattcagtataataacttaaaccgcaaccggatcttaaaaccctaagttaagtttccttgttagaagatacaaagccaaagcctcatatggactttagctacaccattaaagctttgagaagcaagaagacacttggttagtgttttggagtcgaatatgatttgatgtgatgtgtatgattgagtataagaactttaaccgcaaccagatcttaaaagcctaagtaggttttccttgttagtagatacaaagacaaagactcatatagatttcggctacaccatcaatgctttgagaagcaagaagaagcttggttagtgttttggagtgaaatatgacaagatgtcatgtgtatgagtgaatataacaactaaaattgcaacaagatcttaaaagcctaagtcttgtatccttgttagaagatacaaagacaaagactaatacgaacttcagctacagcatcaaagcgttgagaagcaagaagaagtatggttagtgttttggagtcaaatatgacttgatgtgatgtgtatgattgagtataagaacttaaatcgcaactggatcctaaaagcctaagtagtgtttccttgttagttgatacaaataaaaagactcatacagactgcagctacaccattaaagctttgagaagcaaaaagaggcttggttactgttttcgagtcaaatatgactagatgtcatgtgtatgagtgagtataacaactagaaccgcaactggatcttagaagcctatgtattgtatccttgttagaagatacaaagaaaaagcctcatacggacatcgcctacaccatcaaagctttgagaagcaagaagaggcttggttagtgttttggtgtcaaatatgactagatgtcatgtgtatgagtgagtataacaactagaaccgcaaccggatctttaaagcgtaagtattgtatccttgttagaagaggctacaccatcaaagctttgagaagcaagaagaagcttggttagtgttttggagtcaactatgactagatatcatgtgtatgagtgagtataacaactagaatcgcaactagatcttaaaagcctaagtattgtatacttcttagaagatagaaagacaaagacacatacgaacttcagctacaccatcaaagctttgagaagcaagaagaagcttggttagtgttttggagtcgaatatgactgatatcatgtgtatgattgagtataataacttaaatcgcaaacgtatcttacaagcctaagtagtgtttccttgttagaagatacaaagccaaagactcatgatatgttaggctaggataccactttattcgattaccccatccttaggaatttctcatctatctgatttctctgttttatcgttatcgcttaatcgttctcattgcctgtttctttatttttgcaattactcgaccacacccagtgtctggcaacagactgtgcagtcgagtatatctgtttcatatcctttctgttactcgacttgttactcgaccacatcctacttctggcatcagcctgttgtggtcgagtgattttaataattctgttattatttctgttttctgcatgttcacgtaggactgttagaaacccctatactgttattgtttggcttgacttagtgacttctgatcacatctcatttgtttgcatcacacccatttacaacgacatgattggtgttttaggataattgactaaaaacatattatcaactcatacgtacttcatctataccagcaaagctttgagatgcaagaagaggcttggttagtgttgtggagtcaattatgactagatgtcatgtgtatgagtgagtgtaacaactagaaccgcaactgaatattaaaagcctaactattgtatcattgttagaagatacaaagacaaaaactcatacgaacttcggctacaccatcaaagctttgagaaacaagaagaagctttgttagtgttttggagtcgaatatatcttgatgtgatgtgtattattgagtataagaacataaaccgcaaccggagcttaaaagtctaagtagtgtttccttgttagatgatacaaagccaaagactcatacgtagtttagctacaccatcaaagctttgagaagcaagaagaagattggttagttttttggagtcgaatatgacttgatgtcatgtgtatgattgattataagaacttaaaccgtaactagatcttacaagcctaagtagtgtttccttgttagaagatacaaacccaaagactcatacggacttcatctacaccatcaaaacttttagaagcaagaagaggctttggtagtattgtggagtcaaatatgactagatgtcatttgtatgagtgagtgtaacaactagaaccgcaaccggatcttaaaagcctaactattgtatccttgttagaagatacaaagacaaagactcatacggacttcggttacaccatcaaagctttgagaagcaagaagaaacttggttagtgttttggagtcgaatataacttgatgtgatgtgtatgattgagaataagaacataaaccgcaaccggagcttaaaagtctaagtagtgtttccttgttagaagatacaaagccaaagacccatacagagtttagctacaccatcaaagctttgagaagtaagaagaagcttggttagtgttttggagacaaatatgactagatgtcatgtgtatgagtgagtataacaactagaatcacaactggatcttaaaatttgatgtcatgtgtatgagtgagtataacaactagaaccgcaaccggatcttaaaagcctaagtattgtatctttgttagaagatgttaagacaaatgctcatacggacttcggctattgatatgatcttgggtgactagattcagtcccttgaagtctctttgtatagattgtgatgaagtgataatgatatggtgaatgaatggatctgtgcggaagttgaagggttgaagatggaatgatgatgatgaaaaccaacagaaatggataaagtgaaacttccaagagttgcgcaaagactcttgaactttcaggctcgatcttgctaggatattacgcaccaaagcaatcacaagttgaagagatattacacacccttcagttctaacaattcagaaaaagatttgataataaaaagtttgatgagttttacataggagaagagaatagaatatatagagaagtagaggagccttagagaagaggaagagtcatcctagagaaatgaacacacaaaaacgaaatttgggtttctcctttgctaatgggctttaaaacaacaatgagccatgataagagtgtgtgggcttgcctcattaaaaacctctcttggaaaatccattgggacaaaaccaagaggacagaaaaagagtgcaagttacacacctccattgttgttgcttaaacggcttgaatcgcaaccaacgtggttggacaagcttcttgtttaaggctgccctcaatcttttgtagaagtgtggtgatagcttgatttagtagctttgtctttgatcttgttattggaccttcaagaacatgcaatgcttcatcctctttagctccaagctctccatcctcaggctgcgttctttctccaaactcctcgggttcaacctgctccttacctccatgatccaagcttcccattatcacatcatcctctcccacttgaaaaggatttgacctcaaatctgtttcatctacaataaaaggaacaagatcagtaagattaaaactattactcacattatacgtaccttgcaaatccatagagtaggcattatcgttgatcctcttgagaactttaaaaggtccgtccatccttggcataagtttagactttctctcctcaggaaaacgctcttttcggagatgaatccaaaccaagtctccttcgttgaagataagctcctttctatgtttattggcatgcttagcatattgtttggtcttctcttcaatgttctttcgcgcctgctcatgaatctgctgcactaactttgctttctcccttctatccatgctaactcttacactcaaaggtaaaggcatcaaatccaaaggagtaatgggattgaacccataaacaatttgaaaaggtgaaaatttagtagcataatgcacataatgattatatgcaaactcaacatgaggttaacagtcctcccaagtcttaaattctttttttatcaatgcacgtaggagtgtagacaaagtcctattaactacctcagtttgtccgtcagtttgcgggtgacaagtagtagagaataacaacttagttcctaacttagaccaaagcgtcttccaaaagtaactaaggaacttagtgtctctatttgatactatggttttaggcatgccatgtaaacgaacaacttctctaaagaacaaattggctatatgcatggcatcatcagttttatgacatggaatgaagtgtgccattttagaaaatctatccacaaccacaaaaatggaatctttacatgtcctattccttggcaaacctactacaaagtccatagaaatatcattccaagaatgcaaaggaataggaagaggagtatacaaaccgtggggttgtgacttagccttagcttgtttacatgtcgtgcacctttcacacattctctccacatctctcttcatatgcggccaaagaaagtgaacttgcataaccttaagagtttttgagactccaaagtgtcccattaagcctccgccatgtgcttcccttataaacagctctctcaaagaagaattaggaatacacaaacgattatcataaaacaagaatccttcatgtctataatattttccataagcaattttttcacatgatgaatatatcttatcaaaatcagaatcatttgcataaagagattgtatatgctcaaatctgagtaacttagcatcaagagatgagagaagaacatacctccttgacaatgcatcgaccactacattatccttacctttcttgtacttgatgacatagggaaacgtctcaatgaattcgacccacctagcatgtctcttattgagtttttgctatcctttgagatgcttcaaggactcatgatcggtgcgaatgacgaactcgttagaccaaagataaatgttgccacgtttgtagtgctctcaccaaagcatacagctctttgtcatatgtaggatagttgagagtagatcctcctagcttttcactgaaataagctatgggctttttatcctgcattaagacagcaccaattcctacttagaggcatcacattcgatttcaaaagttataagaaaatcaggaagagataagacatgggcatgagtaagtttctcttttaaggtttggatcgcattctcttgagcttgttcccacttgaatcacacgttcttcttgataacttcggtgagtggggctgctagagtgctaaaatccttcacgaaccttctatagaagccagcaagtcaatggtaactccttacttctcctagtgattttggacttggccattcccgaatcgctttcactttcttttcatcaaccttaactccatctgtactcacaacaaaacctaaaaagacaaggttatccgttcgaaaagtacatttcttaatattggcataaagcttttcctttctaagcacttcgaaaaccatttttagatgctcaacatgctcttcaagactcttgctataaactaagatgtcatcaaagtaaacaacaagaaaatgtcctatataagctctaagaacatgattcattagtctcatgaatgtactaggtgcatttgtcagcccgaatggcatcactaaccattcatataatccttgtttagttttaaatgcagttttccattcatcaccttctttcatcctaatttgatgatatccactttttatatcaaccttagaaaagatgctagaaccatgcaattcgtttaacatgtcatctaatctaggtatagggtgttgatacttcaccatgatattgttgattgctctacaatcaacacacatacgccaacttccatcctcttaggtacaagcaacaccggaacagcacatggactcatactttcacgaatatggcctctctccatcagctcattcacttgattttctagttacttggtctccacgggattggtcttataagctcctggaacaaagtcaatttggtgctcaatgcctctaatgggtggtaaaccttctgaattttcctcgggaaaaacatctggatagtcctgcaaaagaaacttaatactactcggcaaaaccggttccaaagctgttatgttcaataagttttccttaaagataaacaagagattatgtttagtactcccctttggtttactctttgaaggctcttttacacatccttttatcaccattctcagtctagtttcatccatctttcatagcattcaccatcatttttgtacattttgcatctttagtcgagtctaggactagtcttgcatacattctgcattctggatttgtttcaggtgttttgaagctattggtgctctgaaagaggaaaaacagaacagaaagtcacatttccacctacatactcgatcaccagtagcagagagggaagcagtcagctcagtagtccatccagacacttctactcgatcgcagaggagaccaggcagaccattctggcagatatactcgatcgcagaggagaggaggcggtccattctgcaattctactctatcgcagaggcaaccaggcagtccactttgctagtccaccagttatactcgatcgcaaaggagaagaaccagtccatcctgacagctgacacacttactcgatcacagaggccaagaagcagcacagaccattctgtcaaccaacctactcgaccaccacctcgaccctctgatccatccgcactcaaccaaacaacctgagcatccgaaagagaagagaagagaaggcccattcgaagcccatttgaagcctatcaggaagcccactttgagccgatactcttgatcacgtcgtctatgggccgttaagtgggctcgaagcccgctttcttatcttagtataaataagtctctaagggtttcgccttgagacatgcacttttagagacacgaaaatcaaacagaaacagcaaaacactcgaccaacacaactctgtgtagagcactggatgaggtcgagtgacaggtcgagtaacaggcagaaagtgaaacagggatactcgactgcacagtctgttgccagacaactgggtggtcgagtatcaggttgagtaacaggaaagaattgcagaaactatgcaacagataacaagatgcagtaaacaacagtagagtaaacaaagaattcaatcagataaagaattcccgaggatggggtaatcgagtagtttcgttttctcagtttacaggtgattgacatgctcaataaattaaccctagacaacaagttccttaaccaaatctaagtgccaccgcaacagagactctcaagttaacctagtcccagactcaatcaccattgacgagagctaacctaacaggcattacgaatcaacaagttaaagccaaaacgctccctgcaaccaataccttggtacagggtcacgaatccctggaattagtggttcagacatttcatcgaacaccttttgggcgcggaaatgtctgggctcaaattccagttgatcagaaagcaataggcattaagaataactaatccagaagagatgtatcaatcaatactcaatcacctagcatactgagaatcctacactactctaacccatcctcagaaacctattcactactcagacatcataacagaaagcatagacgttgaacaagttgaaaacatgataacaacagtgtaatagcaggatgataacagaatgaacaacagtaaacaaaatcaagaacaaaagctgaatactaaagactgaatagataaagagaaatccggattacaaaaagtatagaacaaaaggtctgcggaataaaactagataaaaaacttcttgtccaaaaatatgaactacatgctacttatagtcaaatattccgaaaccctaatactcaaaacgacgaagtattgagacggattaagaactgtactcgacccatgtggtagactgggaggtcgagcgagtagctggagtcttcttttcttccttgtgctcgagtgtctggttgagtgcggaatgaagaaggctctgcagcttgtcatcgagtatgcagtcgagtggtgtgatggtgatactcgacttcctggtagagtatgcagtcaagtggtgtgatggtgatactcgacttcctggtagagtgatgaggtcgagtagttgtctggcaaagggatgaagacacttgacctgggggtcgagtgatgtgatcgagtggtggtcaggagatggagatgaagtcactcgacctgggggtcgagtgatgtgattgagtggtggtcagaagatagagtggtggtgtcttctactcgcctgggggtcgagtggtctcttgagatcttgaagctcctactcgacctctgggtcgagtggtttgtcatgatcaggtccgcttcttccagttagctcgtcgacagctccaaatcacgtgaaaacaacacaaatatacaacatgcatgcaaaactatcctaaacatgcaaagtgatgacaaatgatgtgaaatggtataaaacagtgatgatatgatgctaaaataatgacaaatggatgcttaaaacatgcaaaatatacacttatcagtgttttaggataattgatctcaaaaacctattattagcttggattgaacagtttgagatccttttttttcatgctaagctgatccaagtagatttcatgagatgccataggtaccaaaatggtttttcttcctttaaactcaaagctatatttgttggtaaacccatcatgtatcactctccgaccaaattgccaaggtcttcctaacaaaacgtgattagcttccaagggcagaatatcacataagacctcatcctcatacttctcaatggctaacggcacttgaacttgcttagtaacagccatttctccactctcatttagccattgcagtttataaggtgtaggatgcagaaactcctctaaaccaagtttctagaccataatctcacttgcaacatttgtacagcttccaccatctataatcaaactacacacttttcttttaatcaaacaccttgtatggaacaaattctctctttgcgcttgctcttctgctttgtttagcacacttaagaccctcatattcacaagtagcactcccttaggtgcttcttcaacattcggattcttctggtttctcatcctcggactcaacctctccactgtccctaattaccataattcttttgttggaatactcactagcataatgcccaaatctgtgacatttgaaacatttgagatctctagttctcgtaacttctttttctttccattttgaactgatttcttcaaccttaggcttcacaaacggcttgtactccttttgaaaaccagatttctcttctctttggtagatatgttttcttgaattgtagctaggcttagcactccttctcttaatctgtttcttaaacatgactgccttgtgaaacaattcttcaaggttctcatagtgtatcacctccaaacggtctataatgtctctattgaggcctcccatgaatctaaacattgttgcttcacactcttcatgaacatcagcccttagcatcaatgtttccatttctttgaagtagtcatcaactgttctatttccttgaagtaaattcctcaacctttggtgcagctctctatggtaatgactaggcacaaaccttcttctcatgatattctttagctgattccaagtttcaatagggggtagcaacacgatgttgaactaaagactgaagaagcaattttcgcaaggatcttagtgatgaaatgcttacctccgtcactgatgactatgcacgacactccaaaacgagggaggatgatagacttgaaaagtttcatgacaactgctgaatcattcttcgggctagcaatagcctctacccatttggagacataatcaatagctactaagatgtcgagattcttattcgatggtgggaagggtcccatgaaatctataccctaacaatcaaaaagttcaacttcaaggataaatttttgaggcatctcattacgcttgcttatctttcccctcctctgacaaggatcatactgcaatgtgaatttgtgagcatcctgaaacattgtaggccaccagaaacctgcttgaagaaccttagagattggcttaacggtaccaaaatgaccaccatagctggaactgtgacaatgcaatagtatatcatgaacctctgttgcagcaatgcatcgcctataaactccataaaaaaaaaattatagagataaggttcatctgaatagtatcacctaatttctctcataaatctcttcttgttgtaatttgtgaaattatccagttccacatctgcagctaggtaattaacaatgtcagcataccattggtagtccttctcgaccgctgtaacggcgcagttctcggttggtaaccaatttcttgtttgattgggaggatgtcgatcgacatccccagtggtgttgatcgacaccatcgagcaacatcgagtattatccctctcttataagtgagtgtcgatcgacataggtggagtgttgatcaacactgaagctcgattctgcaacacaacaattttgtagtcatcttccttagttgtttcaatcatgtatatgttctcctcaggcaataaatcattaataggaacatcatcttcaatcctaatgcgtgacaagtgatccgttacaccattctcaactcctttcttatctcttacctcgatgtcaaattcctgaaaaagcaaaatccatctcaaaagtcttggtttatcatccttcttcttcatcaaatacttccaggcagcatgatctgtgtgaacaatcacctgtgatctaacaagataagacctgaacttctcgaaagcaaacaccacagctaagaactctttctctgtagttgcataattcctttgagcatcatcaagtgtcctactctgtagttgcataatttcttatccttcctctgtcctagaacagtcccaactgcaaaatcacttgcatcactgataacactgtattttactcattttaggtgtatgtttatcatcatttagctttgcatttgctcattatatcatatcattttgcaccattttagcttattttgcatacttaggcatctaggatcatcttgcattcgcattgcatgttttggtgtgttttcaggtgcaaaaggagtttaaaaggactctactcgatccattcactcgatccaggcagctacagaagaggcatcatcctactcgatctctttactcgatccaggtagctacagaagaggcatcatcctactcgacctctttactcgatcctggatgctacaaaggaggttgcagtttactcgaccctcctactcgatcaaggcaacctcagatgaagcagcaaattcaactactcgcccctcctactcgatccatttactcgaccaagggtgaccatctctacaagactcggtaagctatcaaagcgtcttcggatcctcctcattccccactcaaccaaacaatctgagcatacggataggagaggatgaagcatctactcgaccaattgatcactcggagcatagacacaaaggcgcagactttgcagcatcctctttactcgatccccaaggtcgattattcgcccaaaccgcctcaagtcttttgtcttctagttaatctagggtttccaacattttagtataaatagatcatttggggtttgtccaaaataaccgatttctccagtgttctcaggacgcgaagaatgagattgagattgagctaaggcagagatctttaccctacaacaccaatgaaaaaacaaaccggctgaatgcaatttttccagtttaaatctcacctagacattttatcgaacatctagagtgcacaatgagctcatctacagaaaacttcataatcaaaatcccaagtcaaactcgttaacactaagcaacatcgatatagagagatagctcttaatcgatccacaaacccatatcgatctaactgaccacgaactaacaaagcaaagacgtagagagaaagaaacatagaaacaaaagattgagggaaaaaacaataagagatacggataataagaagaagtcgaaccaaagcttcgataatgacgttcactacaaaagtagacaacgacaacctaatctaaatcgcagattcaaaggagaaagagaggcaaaaccatcaaaccttctccgaccgaatccaacttgccttctacttctagagattcaaaatccaaaatggttgggcaagagggtgagcaaaatacaaaacaaaggaagagcaaatgacttgaagaagaaagtagagtgaaaatttagatttagagatggacacgggaagaaattgaggggttgaaggtggattgagagagacgtagctttagatttgggttttttctgtcttattcggttttatgaataaattatgatgattaaattttcagatctgagatagattgctcttaagtaaaatatttcttctaattattggcggaataagggattttagcttcccgcttaatgattttctatcttaacgttgttttagtgctattatatagtaatcaaattaaaaaactatctttcataacagttacgaaaaatgattatcctcgtctgctatcaatgtggatatttctggtagtttataattaactataccaacagattaactctaccacactatgacagacttatttccatttttctggcaattaactatgtttttctgagtaattctgctgccactacaaattactcgactttataagtcaattacatttctctatcttttaactttgccaccacgttacagtatatattctctaatgctatgtgagtaaacggagaatcctaatatgtcatgtaacttgtttatcaacttaactctgccaccactataaataactcaatcacacaactctactgaatatatctctaccacgtaactcaattaatttattaactttaccatgtttcattaaccctaccgtcactacagcgatagacttatgttatggtgtgctttttcgcgggcgaaatacagtttctctcactgacatgacatcatcttttaaggaagatttgcaaaaatatcatttttctactatccttttgctacaatacgctttttttgttgaccatttttaaacatatatcttttcttgaacaaaaaaaaaacaaattacccatcatctaatgatcaacaattcgtacaacacatgacagtaataaacagacttttatgtgttgtttgagtaactcacccaaaaaaatatcgtagaccaaacaacttatttattttaatttaagtataatgatttgttttattttgaattgattttattaattattagagatgtgttctttttagagtcgtgtgactctccctttgactcttttagaaaacaactaaatattataattatgagtaattaaaacgggatgattgtaaaattcccaaattctcaattaaaaacaatatttttttggttaatttttttcttttctagagtcttctccgcaaatctcgttaatggtttttaaaccggtgacagtagctgcttaaaaataatgtaaggatggtgtcgctattaattccgacaactctagaattttgatattcaagccgcatcagcgacaataatgtaagaatttcgattttgggaatctagggttttcgattaagagactttttaacgatatgccttaactgacttaatcaacacgaattcgtgatcaaatcgaaagtcaacataaaattgaggattgaaatcactaaatcaaaacttatgctttaaaccaataaaaactaatgatttagatgacatttttaattttttccttttttttaaccatttttcaaaatctttaaattaaaaaacttctctatcaatctccagttttaccgaattgaaaaaaatacaatctataaatttcttcttaaaccaattacccatttcaagggtcagagttcctaaacatgttggatccattttgttgcgaacatctttaagatccgataaaagacttgtttgagagatctcaaggaagaagaagaaggggggaagcagataacatgtctgcgattgtttgcgggaagagatctctgttcgaggacttagccgccgcttctcctcccgtctccaagaaactccgttgcttttcttcatcttcttcgtctcgtttttctcctccgattcctccttcttcctcacttcttctcgatcacctcgccgcgattttccccgatatggataagcaggtccttcatttttccgatctccatcttttttttcctgtttcgattctggatcattttattgattgattgttctttgattaggtttttcgattagattgaaatgaaattatgcaattgtgtttatcagtaatgagcatatcgatagatgtttttggtgatttattggacctattagaggagcatatgtttcttctgattaggcttctttatgtctatggatgtctgtgatggtttattggtgttataaagttgttgacatttgtgtgtggtagattcttgagagggcaatcgaggaatgtggagatgaccttgattcagccattagatgtttgaatcagcttcgtttagaatctgccaataagaattctgattctgctacaaaccaatctcctgttgtaatccaggaaccaaatgttgaacctcaacagcaaggtagttttgtgtcctactgatctctaaacagtttactagtttcagtgtattctgcataagtcgtagactcgctctacaaagttttaattatgaaacgggttttggtatttgtaggatcagccaaggaggaaccaaatgtcttgaacttggatggtacagagtgggttgagctttttgttagggaaatgatgaatgcttctgacatgaaagacgccaaagcccgtgctgcaagagcattggaagctttggagaagtcaattaatgcacgtactggtactgacgcaatgcaaaatctccaacaggtgtctcatctatctttctttgtttctttcttcactctttgttgataagaagttttgttgccagagatgtatatctatctatgaacatccgatttttcaggaaaacatgatgctgaagcagcaattagaagctattgtacaggaaaacagtttactgaaacgagcggtagtgacacagcagaagcggcaaagagaatcggaagaccaaagtcaggaattgcagcatctgaggcagctagtcactcaataccaggaacagttgagaactttagaggtctgtattaaatgtcttcaccttatcttatacaattttgttgtctttttgtcgatatgattagatctaacttctaagttttgttttgattgctccttgcaggtgaataactatgctctgacgcttcatctgaaacaagctcagcaaaacagttccatcccggggcggtaccatccagacgtcttctaatactttgtgaggccctcgtatcattttgtttccagtgtatttttctctgttggtttgtgactatttatatatattcggggaatcaaaactgtgttcttttgttgttgttgttgttgttattgttgtatatattctctttcgagttcaatgatggattccacagatataagacttatttcaatcagttaacaaacagcgaatagagtttgttatgttgctagtagcctggtaatactagcgtcaatgagagatgttgacgccggtcgttcatcatcggctgactgtttttgtctcggccatagccactttgctctgttggagtctggcggtcacaagaacttacgaacagacccataaagacttgagtattgttagaaaacaatcacaacagttcttgaaacaaaactttgatatcgaaccgaattggtattgaattattttggttcatggtcggttattctagactaggtgtaccgatcggcatatgatttagatgagctcggtttgaaaatttaatcgaacatattggtctgttattctatccacggagagggtgatttagaaatccccacagttcaaaccatgcctgcaatatttacccaacttgaaatctttgaaatcgaaccgaaccggtgtttagttactttggttcatggtcggtttttctaggtgaaccgataggcatatgttttaaatgtgctcggtttgaaaatttaatcgaaccaattggttacccaatttatttttattatttgtcctaaccaaaataaaccggataattccacaattgaagaatatatatagaaactcctctaaaattggtaagcaaacccaaccgattcaaacattagtacagattagaatttgatccgaaatatacgagaaccgaatcaaaaccgaatattattcggataatttcattagaaaaccgaaaaactaattgaaccaaaccgtttgaccgttgaccagaagactcatgcattgttcaagcaccaccaccaatatggcaataagtattaacgaaactttcgtttaaaaccatgtgttcatactttactctattgaccaaaatttttttgtatattctaacatattttattatctaggttacatacagaaataaaacactaaaacgaggggcaaaacagtaaacctaacctaaataaggaaaatacacatttatttaggcagagataatattagcttagctggacaaacagtgacgacggctgggctgttcaaaatcatttcttctctcttccgtcaaaattattattctctcgcagtcgtcaagagcttcttctacaacaatgcaggtgaacaataatattactctgatttttgagctacaaaagtttctgcttactaattttgttttctccgaattcgatgtagacgacgagaagtgttcaagtaaataatgtctcagatctagccacagagagagagattcacgagtttttctccttctcaggcgacatagaacacattgaaatccaaaagtaaacttcaaattttctccttctatactctcttctatgtttcatttcaactttaccttcaaatatttgtacttgcagagaatttggacagtctcgaatcgcatttgttacatttactgatcccaaagccctcgaaattgccttgttattatcggtatgtaattttcaccgacactttttatgaataaacattcatgtatgtgtatgtgcatttttgcttaggaatggttttagagagttttgtctttagtctttgtaacaaacacttgaactagttatgagactatttgtgcacaacagtaacagaatcgacatcttgccttgtagggtgcgacgattgtggaccagattgttacaataacacgagctgaaaactatgttcagaggcgtgagacacaggttttgtgttgttttgaaacaggtttttactcaagtccggtctatttgatgtcttagtttctgttcatgtaggaagtaagaatgttggacaacgcgatgcctcttggtcttcaagagagtactacacaggttaggagacgtgattttcatacagaaacttgtctatgtgtgatatagtatagtattaaacatgttgccttgtgcagactaaaacgaacatggatggtaatagtagagcatacgttagcaaagcacaagatgtggtggcaacggttttggcaaaagggtctgctcttggacaagatgcagtgaataaagccaaggctttcgacgaaaagcaccaattaagagccaatgcttctgctaaagtttcatcttttgacaagcgagttggtcttactgagaagttatctgttggtatttctgctgttaatgagaaagttaaatctgttgatcaaaagcttcaagtctccgataaaactatggcagcaatatttgcagccgagaggaagttaaacgacacgggttcagctgtcaaatcaagcaggtataaatccttagacatccttcttggtaatagatatggcaggaatcaactttgtccatctttaactacttttctaccctgactttatgaatttgtttctttgtttgtgattatgcttccaaataggtacgtgactgctggagctgcttggtttagtggcgcttttagtaaagtggcgagagtaggtcaggttgctggctcaaaaaccaaagagaagttcaatctagccgtctcaaatatgagttccaaggttagtcatcaaaccaaatctatatttctggacgcaacatttgttttggttaggtggcgacaatatgttatttttttaaccaaaactgacttagtactaaaactagtaatggttttgagtttcaatgattcttaatgatgattataatttgatgtagttacctacttctttatggctaaactgattaaactggcttacgcaggatacaccgattgctgtataataaagagcttggaatcaagtaagcgttgaagtcaggatcaacgaaagttgctatactagccttgtgtaaacaacatttttgtgatatagcttatcctcattcttttagtgtttcctcatattctgtgtgtgctgcattgtcctcaaatctacttcatgtttctcattagtgcaagtgttttttgatttcctagtttcctacttaaggcatggtcgttgtttgtattgtgctgcatcgaaggacactataactgcattgaaggtctattggttctactcgaatattagtttcccttactatagcttataatttaaaactggttgatagtacatagtcacggatatcattttgtctgtctacaagaaagttacagaaaaccagttacacaaaactataatataggttccaaaaagcaatatgtttatatgaatcttgtaatgctcttctaaatcctggtctgattcatgtgcctcaacccattattttcacttcttgtcccatgctactccgtcttggtcaaaccgagtcatcgaaagatgctgaagaaaacaacacagagcaactctaaaatacttgactacaatttctagaactggaacaaaattggacgtagttagcatcacaaacctgtttttctttggtgaatattctcctctagagaagtcatgagcagcacaggggcagttctgtttctgaccagcttgagtaagaaggtacatccaggtttttgaccgttcgcctcgcagaaacttttccagccgcgtgtgattctaaacctaccggagtacttgctgtattttaaacttaatatccatgttcttccctctttgttcatcaaaactatctcgtgaatttttttgtccagtaagtttgatcttgaaagccttattggaagatgctgcaacaacaaataatcagacagatacttctatttatcaatgaaatgcaaaagccattatataagaatagaagaaaagtgaagtgctaaccagtatatcttcacttagattagaaactgtgacagataccacaaagctagaattatctgacaaagacaatgattccaggttcttctcttctttcgcagactcatattctacttcttgcttaatcttcttagagttcttcgctggaatagaaaaggttccctcataaacattgcattcctaactacatataaaaagcaagggtgtgttgaacttaccaatgctgttctcatatctctccaaaggaaaaatccggagtacgggtgtttttccattttggaccaatatgagcctcaagaaacaaccagttttatgctcattcctgcagcagaaagctttccagcctcgcctgacagtaaaccgatcatctgatatactgtagctcaagtctagtatcgatgacctacctttttgatccataaaaataatcttcttgcacagtttactcagaccacttgaggtggttaaaccttttggaagatgctgcaaagaaaatgtctcaagttgataacattcatgactattaactaagaaattcagttaaataggagttataatagtttaagaacttctcacaaatgaatcatgtcgttggtttgaagctgtgacagggaccacaaaattagtgtcttgtgatgtagaacacaaatttttgggatctttctgcagtaatctatctcttttaagctttcctgattccacattcgtctcttctttcacagactcctcatgctctacttcttgcttaaccttctttgagtgtttttctggtatagaaaccgttccttacaagcattgcagtactaactacatataaaagtaagagagtgctgaacttaccaatgttgtcctcatccctctccaaaggaaaaatccggagcacgggtgtttttccttttcggaccaatatgattctcaagaaacaaccagttctataaccattcctgcagcagaaagctctccaacctcggctaacacaaaaccgattacttgatttattgtaacgcagttttagcgtcgatggcctgtctttttcatctattagaattatctcattgcacagtttactcgaaccacttgatgtggtaaaacctcttggaagatactgcaaagaaaatttccaaagttgacagcaatactaatttcattccataaatataattctaaagaagttatagaatgaaggacttattacaaatgaatcaactcgttggtttgaggctgtaacagggaccacaaaatcagtgtccactgatgaacactcattttttccgtttttcttcaccgttctagatcttgtaacctttcctgaatcagaagcagacccacaagtaaacatcaacagtttcctcttttcgtatttaacttgaaagtactgtaaagaacttaacttacccgtcgtgtctttgacatctttctcgtctctctgtgagtaaagtatctcacaaaaactcagtccaaaaggtgtgacatgaaacaagagatttccttcgtgtctgaaaacaagaatgtcgtcgacctgaagattgtgagccaccgcaaattcttcccaccctttggtcattcttcggccgtctatctttattttccaagtgatctccgtggcgtctgatctcagttctgcagcgtttccctcttgtcttccctctaagtagttcgagtaaaaagctttaggaataacctgcaaacaaagaaaaacagagtaagaaaaacgttaaaagaaaatctaacaacatgcagagagaaagagagagagagagagattacaatataggtttcgaagcctggaagcataggcttgatgaagtgtggcttggccgaagaagagaacattgcatcagtcattgatgaacaaaatgtaaccctaactatctcaaacactcttcagatttcagagaacatatatgggagaaaaagaacacaaagcttgtcggggtcttttcggtttccccccttgttgttctggtctggtcttcttctctattccacgtttcagttctcgattcgtcatcacttcaatttatttatctatatttttatatatcaagctagtgtaattagaaggatttttttttccaaaagacagataactttaaagttcatgcatccattaatcagatcctaatttatattggaaaatgatgaaataaaaagttatttaagatggtttaaattcactcaaattaaatcctccaccacaacagactatacattataagacctaattttcttatagttatgaaattcatatgagttttcgaggaattcaagtttgaaaggtttagagttggagaatcaatggaagatgcattacgtttatgaaattaggaaaggatcagtgcttcaagagttctgtcattgcgaaggatggccattgtgggtaatcgtaatcgcggaacaataacacgattttgtggtttaactcggtttattgaccagttcagttggagggtatttttacggatgaatctgaaagcgtatttttacggatgaatctgaaaatatatgaagttttattgagaaaaatgttaattgatggttttttaagaaaaaaaaaaagtaaggggttgggagggggaagggatgttaagttttgtaaatagtttatgttggaaaattcaagtaagccaagttaagagaatggcatctcttttcagccaaatttcttccactttcttccataactgagcttatcagatggacaagaataaaagcaaatatcaatatcccaacttttaagccatgtccatagaaacacatgcttatgtataagaggctcttcacagatgttgaatccaagtataaagtgacatctcggcgttacaattttctgtcgaaagccacatcatgagatcatcgcaaaagagcagcaacagaagctcattaaaatgaaatgctagacgagacgaaccaaaggtcatcatcgccattggtactcacacttactgaaatttgtgtggctcttgataaaaatggccactcggcagtatatacaccaatctcttcatatattgttctaccgatttactcccatccaagagcgaatgaatgaatttcggcccagcttgaaactgtgtaaagtgtgccagagagtcctttccatgctgatgatgatgattcttcagtgtgttgtttctgtttctggacgattccagaaaacaaaggcacaaatgagaccccaaaatggcttccaactctcctgagactcgagctagagctaaccactattcctatatctgcttcgaggagacacagcaagtcacctaccgaatctccaatatacacactcaagaaacttttcttattgttctcattctttctgttttgtaggatacttttgaactgttgagctttgttaattggggattccacctttctttcgatctcaccagtcgagatggattcctcaaatgtgaattcatttgcatgtacttccactgcatctactccgcctgtaaagaggagattgtgtttagcacagtttcttaattctagggactgaattgtctgaaaaatcacaaagttaaggattttggcacatacctgcagaaaaggctgccctgatgaggtcaccacaccaacaataggaaagcacatgaagttctgcattcagattctcagtctttaaaattttctggaagacattgatgcatccatcttgaaggattaacctttccccagcgcgcttaatgtcttcaagattcaggcctttgagtacaccagactcaatcactcgattatttgcctctttctcaaaatctgaaagctgctctagtgctttacataaaccttcatagtcaaacttgtccgctgcaaaatattggaagaacaaatttaccacattgagagaaaaacagacaaaaagacccagccactctataaaaggccaagtagattagtatagtcgttaaaactgtgtccactaaaagtaaacaagtctgacctttctttttattcagaatactctctatgcattcttcataatgctctgtgtattgtttagaaagtagattccaggtgttcttaaggtcagatgagagcatccgatgaatttgttgtccagatcgactttgttcatcttttggggcagttacaattgctatttccgctaaaatagcagaagaatccacaacggtgcaagtcagatcaaaatcagaaaagatcaccagatcatcttttgagtggttcttgagcagtggaactatggtaggctgggcaagtggctgggcatggaagaactctacttcaagtttcatagcctgttgatacaatttttcaattatgtccaattcttcaccagtcatagagacactaagcttctcaagcaagtcttcagtttgcttggctgatgcctatattaaaggaaaacagaccattcattataaaagatgcatcatctcacacatcatgctagaaactctcaaaagttaacagaattacgcaaaaacatacctggaaagcatcactagaataattatcgatccatttcttgtagggatggttcacatcactcagatcaagaagtgatccaaactccttaccgagaaaggcatacaaccgcatgcaaggtgtcacagcaccaagcgtgtaggcagcaacttttgttttttcaaatggagtatcaagcatgccgggagctttgcatccttctacttttccggatgctgtagctaacaagaactcagtgtatctcaaagttgctgagttaacacttacttctttgttgatgtctaaatcccaatcctgcgaggatcagacaaacgtactactgagaaaataccatttgataggaaaatcatagtaatgatgtcattgaataaatataaagctgatgacagaagatttgagaataatttttaagaattgagaagctaactagcactaacatacaattaatattcagtatccaggatgaggaagccgcatgtacaagccatagctttaatcaatatccaagtatgaaactttctcactatactccccaagttctgatgtaaaataaagtgatacttttactaattgcacttggaaatgagaaccaaaaggcatagtaacagtttgactcaaatttttgctgttggataagcattatttaaaacacttagcctctaagttagatacatgaagttagttccatcttagggactcatgttaactgtgaaagttaattccatcttagggactcatgttaactgtgatgttctacttccagttaatatgaaatacatgagcatgtaaaacagggaagaccttaatattttacctgtacaaatgagtcgtgcattttcaattcttccatcacgcttttcctcaaatcagaaattgccaatttatcatcatcgtcatcagcacaatctgcggccagttcatacctaaaatcgcagaagcacaatgtttataaagaaaaccagaaaaactatgaaagcctttaattgaaaagtttatacaaattttaaccatttcttcatatcttatcactgataagctaaacaaaaaaaatttctcacatccattgtaacaaaatcaaatcatttgatcaactgctaaagacgaaatgataacgtggcactaaatgagagcagcttcccagaccaccaaaacaaatctcattgtgaataagaatcatatcctatgtcaaggaatagttaggtaataaaatcatttggcagacatgaacaaccaaactaaatatgaagcgagaaacagccttatagaatctttaaaatcattccaagggaacctagagtctatagaatctttaaaatcattccagtctctaacattatctatctacattcatcttcactttgaaatttaaaggatcaaaatcaacttctataacaaagtatcaagcatcattttatcctcaaatcaggaaattcatagagaaactaagtatccgagaagagaacttacgcgtgagcaaaggccttaaggaaatgaacatcctgtgcaatatactgacgaaatgtgtcgatcttgagatttccggcggctaaacagacggcgaaggggctatagatagagaagagacactctctgttaaacttgatccatagcttccctggaagtgcttcttccgaggtagggggaatcgacaacgatgaagagaaagcgaccgccgtcattattggagtagtcgccgatcggaagaccggagacttggtgcgaaaccagagagaacggatcggcgcggtggtgtgtggagatcggaggagaccgagagatgagttgttgatgaggcgcgtggggaagaggaagcgcataaaatgagagagaaggcaaaagagagcttcgctcgttatgcaaggaaggtgcttgtgggtagatagatgcagagacgagagaacgcacttttttgttatttcccttgtaaattgttttttttcccttctcaactggataatttatttatcatgtactaggttacttatcacttatgagatttattttatattacaataatatttttaaaaacttatgtattaagttattgtgatattaaatttaaatatttgatactatttgtaaattttaccaaattttgacattatatcgtaaatctttgtcaaaattattaaaaacgattaataataaaaaatttaagataattatgtttgaaaatataatcttgtgaagtactttttcaagataataaaagcattaataagtgaacaaaaaaatgaaacaacaaatagttataacaaaataatttacggttcaaaattattgtttaagatagtgactaaaactgtactttaaaaaataaaatatttttttgtaaatatttaattctaagaacctttttttaatcttacaataatatatgttttagtaacttcttaaatatttgcaaattattttttgtaaaatggatccattgaacaactaatatgtagaaatgaagataatatatcaaaacaaaaatagggttgaaaatacatgagtgttaaatgaacacataaggtagaaatatatatatgtgttgaaaatttataataaaaatgtaactcccataaatatttttttggtatatttagaatgataaaggatgcgacgctcaaattattttctaagacaatgattaattattctaattttcaaaaaaacaaattagacaaatgacaaataaatatagttatgtcagcacttcttaggaaaaataggtagaataaccttcatctttccttaaaaacatacaaaaaatcctcaacttttttatgaattcttaaaccctcaccttttcataagtggtaaaacaaatccctaacattaataaactgaactaaaattataagagattcttatatgaaaacagcaataaaaaaaaatttaattcatgatttatttttttcaaattcgattttctatttttctctctaaattaaggtttttgcgatataaaattctttaaccatatagttgagattagataaatcagtttagtactattagaagttatgttatataaactacaaaaaattttaggacaacacatttgattttttttggttggttcgagttttcctttgatttaagaaataatcaaagttataacaaactttagattcagctggaggttcaattttggattaaaaacatagtttcggtgagcacattaagtctaatccaacaaactaattgaactactaaataatccgagaaataaaaaacggacctaatattcgaataattatctctttcatatacattcctaataataaggaaggttactatattactgttaacaactttaaggcatgattggttgggttgtagaaagcatctacaaccttaattttttgctacagccctaaaatgtgccaatcatgctttaagttcatttttaaaatctatagcctaaatctattcttttccttttttgagctgtaaaaacaatatttcctaaagccttattattttggctgtagaaattttagaaaaaaatattcagctttttactttctttctcatacattataacgtactagataaggcccgtctatttaggcgggtataagatacaaaaataaatttttatcgatagtatttgaatattatatagcaatctatatatttttttgatatttaatttaataattattggtttaaacaaaatttcagtcttatgcattctattttaattatatacactcaatcttatcaatgatatttgaattctaaaaagtaaccgaccattattctatatttaatttagtatctagaaaagaaaaagaaaaaataaatttctatcttacaccattcaattttgtaatacagtttaactatctatgtcatcataataaactcgatttaaattctacacacttcatattgagtgataacattttcatatcaaaataatatttatgacatatcaaatctatatcctaattagtattaaaaataattaacaattaacaaaacataattaataggcctaggcataatacccaaacccgaagaaccgatccaaaaaacccgatccgaacccgacccaaaattttcaaatacccgaacaggtctaaacttcaaaacccgaaaaacccgaacccaaacccgaataagtatccaaacatatctcaaatataagtatatattagttatatttatacttatatatagaaaatattaggattttttggatattttagatatttttgtgtattttaagatatattcaagcaaaactactcgtgttgttttgggaatttttaaaattttcaagtaatttaatagatttgcagacaaaatttgatatttcaatatataaataaactcgaacccgaaccgaacccgacccgaaatcttaaattacccgaacgggttctaaacttctaagcccgaaaacccgaacccgaaatacccgacccgaatacccaaacgcctagggctaataattaataaaaaaatagaaatctacaaaaatatttagaaaccgaacattgttaaaaatatattttttatatatgccgtaatctcgtaagttaattttacatcatgcaaattaatattaaatgagttaaaattaataaataaaaatattcacattaaaaataattaaaaatttaaatcctataagctaagctatttctctcaaaatgttctattttcacttatgattacattagttaaagacaaatttgttaattttccttttgttgaataaatgttaattgtttataaatatatagatatataaattagtatatgtaaatttgtttactttttaagattttctattttattaagagaataaaaaattaaattttgaatgacacatgtaaacatctgatcgtttgacttgacacgtggcacgatcttaagagttagtaacttgtaaacatctgatcgtttgacttgacacgtggcacgatcttaagagttagtaactttgaaaaccatactttatataataagattatatacgtttatttatattcactatgatatatatatactaactattaaataaataaatatatattttactacaaataataataataagctgaaaacaagaacgacaaatatacacatcaccatgtctattatatacaattatatattgtgcatatacacaaatgttctcattacgtatattttgaatgtttatatcaattttataatatatattatattaaaaactaaaatataatttttattactgatttaatataactatttcaaataatattttttgaaaaatatacaataattacatataactaataattacaatttattttttattttcttattaaagttacatccaaaattccactgcaaaaaaaaactacagctacagctaacacatctacagttacaaacttacagcaattactttacaggaataggcaatcaaagattttgtgtaaatggcaaattaagctatattcgtactccaaccaatttaccagctcacatattctctaaactataaaactataatcatatcctcaaaatatggcaactaagcaatttagatttaacccgtggagatagactaaatattttagattttcaatacaaccagtttcatattttactgctaaaaagtttattgcaaattacatttgtttcgtaaataaaataaaatatataaatttgacattcactccaactaaaatatatggaaatgtctcataactatgagattttatccttatttgattaagtagttttgtatcatattctttgtctctgagaatataaagatttccgaagatatcaaatacttgctctacaccaaaaccctacactttctcaaaacactacaaatacaaccttattcacaacatctaatctcaccaagcacgataaaaggttaaaatacttgctcctttgtgttaacattaattattctgttttctttgtttcatctctaatatcttttgtttttctttttttagcttagagtgttgagatctgatatacctcgattttcactacttttagctatgatatatatatatatatatatatatatatatatatatatatagtttttaaagtccttttgttatttgtaaagtcttttctagtctttttcaggtctttacatgtttgggatgcatttggagattatgaagcattctggagcaaaacaaacaacttaagctgcagaagtcgtttacagaccaaaatccgcgtagagaaaagacttattaaagttttgaagatttccaattcgccccaaaacttcttcctattttcaaagaagtccctgcacgttttttgggtcatatatatagttttaaaggtcattgtttagacctaacacttattatctcctttatttttggaagtaaaaccttgtggagactccctttagaaaagatctttctaaactctattctcttattgtttcttacattgatttcttattcaaacatgttttgttctttgataatcatgtctaagtaattctcttgttgggtttagggattctcattagggatttggatgaattagtagatcgaaaatcatgttaggataatatatttagaattcttcatctttgattgttcttaatgctagttctagagtaattaactagaacttgattttaggataataggtatacccgccataggtatctattactagaactatcttagatgaacctaatatttagatgcggactagagtcgatttagatacttaggtgaacttatcaaacctgattataatgcttgcttagttctagggatttacaagagaggtgggatcaatactattaagcatagtgaatatcacgatacgccaccggttactctataatagtgatttgaattctagaatggtttgataataatcctaatttactgctagatctactattctgatatctcccgagaatttccctaaacccgacgtcttaatcatctgaatctacaatctcttttattgctttcttgtccttattttataatctatttgtttagcttaattcgataaccttgatttattgtatgatttaagaactttgtggaattcgatccctaagtgctataacaacctctttatttgagggagtagtcattaaggtaatttgactcatatcaagatccctacatttgtcaaaacaaatattgttttcgcgcttggtgaatgaagattcattaagattgttgatctctacaagatggttttctaaatggaacggtggtaacaatgactctaaatatggtttcaattatttatccttgcctacgattcaaatttgtttgagtggtgatcttaatcctcgcatgaattcaaatttcttaacaataccttaaactgttatttctatgctcaatatttgtttgaattcaaatttattaataataccttaaactgttatttctatgctcaatatttgatgggttacttttatgtggtacagttcaagtcatgggttgaagaatgaacatatatacctctgtattttcatattttatttcttaaaaagttatggctagctataaattatttaggtaatatatatgggtttcaagctaattccttagtttcatataatttttaaaagaagatttcttaccttgcgcaaacttgatcttttattataaaaacaatattgcctaaacaggctgattgattttttttctagactcttagattgagaagaccattgtcttgcgacaatcttttatattttaccgcccttcataatcgataactgaaattttgtttgatgtaagaaattctttaataattttattgacatgctagtgtgttcttttttcacgtatttgatctcatatcaaagagaaatccaccaatatatgttctttattctaacatgcatatgaagaaacattaatattcggtcaagtgaatttaaaagaaaattttgcctcttcacaataatttgatgaaaaatcaatatctcaatcaaagaaatgggaaaatgataactaattaaagaatatcaaagagatttcagtccaaatgcaagcaaaaaaatgtggtgcaagaaagtgataactaattaaagaatgagacatgggcatgcatgaatcatgatcttcagtaaattcatataaaaaaacaacaaagatgagataggtttgttttgaaatgtgcgaaagagaagatgattatagtaacattttgtaatatattttgttcgatgtgtaattatacaactcactggataattttcctgacttcacctctccttggatccatgattacttctccactaccacactgaactcatatattggaatttttcctctaaatgagaaaattaacatgaatcaacatttgaatcattagaatcttgtttgaaacagaaatataaacaatgatacctagcctgtagaacaatggagagtttttggaatccaaaattttatacggaattagatatgagacacccaaaggagttcaaaacatatgcaattgtgaattcatggaagacaatgggtttaagttaaattttaaaagagtgtgatgaattgaatcaaaagaataagctctttaatctgaaaactctttccgtataggccataaaacaacttggttatatgtttcttatcctcaacaacatttttatttaaataatttttcctttttttaatttggtacaaagctgatgtggcatttggagagagtctttagaaatagctgatgtggatggcttcagaatcctcaaacaactccttttattagtagtagattaaattcttgtgttattagaataagtatttgtaatcattcttgatatatccatattttcactgattttatctatgttttaggtatatgattttgagtctttatgttatttctcgagtctttttagtgtcttttcaggtattctatgcaatgagacaacaatggagatgaggagacattttggagcaaaagctaaggaaaagaaagctaaagacaattttggattcaggaatcggagagagtgtcaatcgacacactcctggtgtcgatcgacaccattttcggcgcagcaaagtccatgacgctttcaaatttatagaagaggaaatttgctctagaagacttccttatttgcattattagtccctcgacttttcataaggtttttatacattgtttagacctaagtttctattatcaagcttt

SEQ ID NO: 1474 - DNA, 121501 bp, Arabidopsis thaliana
aagcttctagatagtacaaaaggtttgattttttcatttagttaacgacgttagctaaacaagttcatttaagttaaacgattaagtcaaaagcacttaacttgactgaaactagtttctaaagtaaaaaacattacaaagagttttatgacatcaagtcaattataagacaattcacaaacagaaatataattgtgatacaaagagtttgatgacattacctggttcaaaaattcgttgagtcttctagtacttctaatgatactaccctccaataggtcgagtcttctaggattttggaagactcataaagaggcctgaggactttaggaacacttgagacctaccaaaccaaagaaacttatcaatcaacataaatagaaggcttctaagggacataatgttttattatcattccaatatacttacatccaagtcaacatgatcaacgatgtgaataatggaaccaccaccatcacaaggacggataagaaacccgcttgacagcattttggctctcacaaagcttgaagagaacggaccattggggccaacagttgcagaagtgagtgacctctcacaaacctgaaggcaaaaagcaaatataaggcaaatctaataaacataatcatagatgaacaaaaccaggagtgagtgctcctaataaatcggttcatttgtctaatcgcaagtgtcaaaacatgatataggcatctgcagcagcatagaagttgtggcacagaggacaccacttccaaaacttgaaagaaacgagctaccgtattgaaatccagcaaatttagcagaggaagagttaatcatgatcgtaatatcctctgctccatcactactcattggagacaatctatcatcgacaaaaccatcacttcctcaaaagcattaatttttaaggtcgacaatcatacaaaaaaataaaaaccaaatctgttattatcaatcaattatgcttacatgccatcaaaattccttactaattattcatgtccaaagagaaaccaacctctataatgaatctttgagagatgtaaaggagtcgatagagaagattacaaatttagaaatatatatccaatagtacctgaacaatcgagtcgcaagtagtaacagaggcctaaagactaacaacctgaagaaaaagaagattcttcaaagtgaacaacgacttttaacagactagcaaccggaagaagaggaatcgtagcaaaggagcataacagtgctatcttggaagaagaagtggggcaacccgaaaatccgcggtgcaaaacgggttagccttatttcaaccgcaatccaaacgggccaagaccgcgaggcccacatttttttggtcttccatacatgggcccaaacccaccccgcaacatccctaaacgggccaggcccgcggagcagaggcctgattgacatggctaaagactagtatcggctacggttggcattggacagttaaggttatcgagaaagttatcaaggctatcaagattcttataccaggatttgttatgggcaatttggttgatcaaggaaactagtatcggctgcggttggctttgggcagttaaggctattgatataaccctgtttttactgattttatctatgttttagatttaggattttgagtctttttgttagttttcgagtctttttagagtcttttcagttattccatgcagtgggacaacaatggagatgaggagacattttggagcaaaagctaaggaaaaggaagctaaggacgatttcagttcaagattcagcgagagtgtcgatcgacacactcctggtgtcgatcgacacctgtttcggcccagagaagtccattacgctttcaagtttacagaagtggaaatttgccccaggagactttcctatttgcattattagtccttgggtgattattaggtcatttatatagttttagaggtcattatttagacctataaagttcttttcatccctattttcatagagacataagctattcatccctattttcagagatccatccagttttcaatacaattaagagatcatttcatactcttaccttatttgttgtgtttatgctttgttactcaattatgttgcttgtttcaatcattatgtcttagtagtttgcttgttaggtttaggatttttcattaggattcatatggtttagtagatcgccacctgttaggttatctatagaattcttcgtctttaattgttctcaatgctagttctagagtaattaactagaacttgaatccaaacaatagatatacctgccataggtatctgtagttggatatattatttgatgagcctggtttataggtgtgtaataagaatcggcctatttactaaggtgaacaattgaactcgtttagaatgcatgtttaagttatagatctctcgtcttctccggttattcttagctataggcatagggagtttcgcgaaacgccactggttattccataataagattttgagtttaagaatggttcgataacaacctaactatcattagtttcatgcattttagtatagtttgcgtatgtgatgctttcccaaggttgtatcctagtagtgtgtgcgtagtggctagtttcctacacatgaatggtacgaagactcggagatgacaagctcgcaacctatggtcgagtgctgcatgacgatgtagcctgagtttcactagaatatgggactctgaacttagtgatgttctatactagtttagcctttttggctacttgtataggtgttcacgactaagggaagggaatatcaatacgtgatgcgtgtttgatttcgcttcagacttttacctgaaagaccacacgactattgcaagtgcacagtatatcagagtagtattttaggatcaaatccacaaggagagaagtagttcagagaaatccttaagaagagagtgaagctaggaccaaaataaagagagggggttgttgtatgctatgagtaactaaactaaaagactactaactaaactaaacgataagcaataagagagaagtgttaggtcatcaagggtttctccgggtgtcatggttcaataaataaggtatagatctcaatctaggtgataacatggttaggtttgtttacttccaaattctcggacatacaaaaatctatcaagaccagctaactctaacggttagtaggtgaaagccggctattatcactaatatcttgcgtacttagttgccctatcggttagtaggtgctaacatggtttcaaaatacaagatcaaagcattaagttcaaattcgattctagtccataagtccctatcactaggcgggtgtgcaacgattatagttctttattcagctgagttaggtcaagcattcaaacgagattttgccaaagcatgaaatacctaaggtcatgactaggtgatgttccggacatacaagcattaagattcaactcaactagaaaaaatagtgtaaacgatcaaacaaaaccatagaaaccgccaacctagacttttgaactattaatccccatgaattcccctttgaaaccccctcaaacccaactagagatctactcgctcatggcaaaggagctaatcaaaagttgggttgagtaaaccataactaaaagatgaataacacttaaaaaagggtttagagattatttctttgaatggagaatacaagaggcaaagatccaccttaaagagtcttacacgaaaacgagaaagagagagagagagatggtgttcttcaagcttcaagaggtgcgacagcaagcgggcagctcttggcgacagctagggttcactggtgatgaaggcacacttagggttagggctaaggacaagtatttatacttgaggcccaaaaattaggtttaggggtaagaatgtcattccgccggataagtaagtgatcgggccgagtagtgggcttcagggaaggagcctaatggcggctgcgcaaaaagggaaagacttgggcgtgacctaatggtcggtggtgatcgtcttttgatacttttagcttcaaaactcttaaaaccttcttggcacctataatacgtgtttctcctcttattggctctagaatggcaccaaatgctctctgaacataagaaaccaatagctaaaacgggttaaaaagttgtgttatcaatacgcggggccccaggtttaatggtagagtagttggttgcatgcatatttaatttcattgcgcattgtttatgtatactcaatggagtatatacatttttttgttgcattgcttggttgcttgctgcttattgattggggttgggttaggttattatcatttttagagatcccggacttaccgagtaatcttagattactcagtattctactttttgtcttacaggtaaccttagttatgaagacctaaagaagagcacggacgttggggaaccagtgtagagtttgttgtctttgtaaagttagatatgtagttattctcgatttaagtattaggctcgagagcccaatccattgtaagtatttcaatgtttattgaaaaaaaaagattttctttaaaagccttgtgtactcctgatattagtcttgtctcgactaacacaacttacggacatggtatgggttgaaaagccttaggccgtgttcttcgtgaggaacgatgttcacggatgaactgaccttggtaccggatgtgttctgggaactcggtcagatcgtctacgggcatcacacgtaacgcttccggattcgttcttagttctagaacggtttgagagtgttacagatggcattgaatatctttgcataaaatctaagaggcaatacctattggaagaattgccaatgttatctttcggattatattgcacaaaaataaatataatcacaacaaatgttatagtaaactcgagtacatttaagacatgatatgaaagatttggacatcctagttcagtcatgacgcaaaagtttttgcaaagttctaataaccatccattgaaaagccaaaaaatattcaaatctgatgagttttcatgtaacgcatgttctcaaggaaaactcataacaagcccatcaccaactaaaattgggaatgaaagacctgaattcttgtcttgaattcattgtgacatatgtggaccaattccacccaccgtgcatgttgttttgatattttatgatattaatttacgcctctactagatggtcacatgtatgtcttttgactacacgtaacacgactttcgcaagattcattgcctaaataatcaagttaaaggcacaatttcttgattgtgctataaagaaagtcagacttgataatgcaagggaaattacttcgcaagcctttaatgactattgtgtatcgatgggaatcgatatagagcatctagtctctcatgttcatacacaaaattgcatggctgaatctttaattaaaaggttgcagatcattcctataccgttaatattgagaacaaaaatcccaatttctacatggggtcatgctatattgcatgatgcggctttggttctttggatcagattatactaagtccagataatgaatattctcctttacaaatgacatatggtcaagtactaaatgtatcccatcttcgcatttttggatgtgcggtatatgtgtctatagcaccaccagaaagaacagaaatggggtcccaaaagagattaggagtatagtcggttatatatcaccaaatataataagtaccagattcgttcactaatagaagcaaggtgatatagaatatattccagtttcaaatggcccatcaaaagttgaaatttctagagagctggaattagaagagagcaaaattaatgagcccaaggttcaattaaagtgtgggaggcctactggctcaaaagataaaaatccccgaaagagaaagaaaatgaaaaggttcttcaagaagaaccaagtcctcgggacgatacaaaaaaatatgagatttcaattaattatgtccataatggtatcatatgggatagaaatgatattgatgatgaaaatagaaatgtgtttggacatattgtcactgcatctgataatgtaaaacatgagtacaagtgggtatttatgcgaaaaaaatgagaaagatgagatcaaacgatataaagcgcgacttgttgcacaaggtttctctcaaagacccaagagttgattatgaagaaacatattctgaggtcataaatgcaattacattcaagtatataatgagcctttcggcatccaataatttatatatgtaccttattgatgtagtgataacttattaatatggatctcttgataatgatatatatatgaaaatccttgaaagattaaaagttcctgaggcattagactcatcgacttaaaatcattaagaaatcttcttcaagatttgtgattattgttgtttatgttgatgacttaaatataattggaataccaagagagattaatgatgcacgaactcatatgaaagaagagttcaaaatgaaagatcttggaaagacaaaatttgtcttgaacttcaaattgagcatttgaaggtatatttgtgcatcaatccaactatataaaaaatattttaaaccgctttaatatggataaagcgaatcttttaattactcctatggtaaatagatctttaaatgttgaaatgatccatttagaccttatgaggataacaaagatatacttggtcccaaagtaccttacatgagtgttgtcggtggacttatgtatattgcaaatagtacaagaccagatatttcttttgctactaatttgcttgcaaggtacaattaatcctctattagaagacactagaatgggattaaacacatattttattatcttcaaggtactattgatttaagattatattattttggaaattccgagtttggtttagttggttttgcagaggtaatgtatctatcggactctcataaatctagatcacaaaccggatatattatttattttgttcgcttggttaacgctggcggatgcgtcagcggctgcggcggcaaacactaccacaagttgttcatttcgtcgctgcagacgctgtggttgccgctgccgcgggttttgtgtttttttagatgtcgatgccgctgccgctgccgcgagtttttgtgttcgtttctatgacacatccacaattttacatttcatttcttattttatttttataaagttatattttgaatccaaaaaatggaatttaaatatataaatccataagaaatatttttttagctagtaatgattttttgttaaatctataattataacaatataattttatgataatcatgagctaaactttttttaaaaaatagtcatgataatgaagaaggtgatgaaggagaagaagtaaagaaggtcatgagaaaagataatgattttgatcttaatcttgcattgtaataatagtataatacactctgtatcatgaatacaaaataaatctttgttaatctacttaacatttttgaagtatattttaagaaatccaattgagtcgggtttttttttttaagtttttgacctggaatcctcaattggacatttccatatctttcatagatattagtctattttaataaagaaaataaaatcaaatcatttactaatttatattttcggcatctttcttttttcctttttaattgatgtaaaattaattaaccatttaaacaaataatttaaaacgaataagacattcccaaaaacttcataccaaataaatgatgtttctataaaaaaataattcttcgcttttgaaaaataataaatggatgattcctaattattggcatttacttaccaaacatagcatgtattgttaagatttctagagatattgaatacaaattcaatgtattaaattcgtatttcctaaatttctgtcctcttatttgattacacatctataatatctcaactaattgctactcaataacaatatattgcatattcctctaaaatccgcgaaatctaatattttattccaaatgtgttatgatatcaaagatattgtcattgcttaccaagatcttcaaaaactaccttacacgactataaatactccctactataacatcgtctaccgttatcaaacataaagcaactaattcattttctagcaaacaaacctccaaattttttgtctccgttgtatcatgatttcattataatcacacggttaggcatgaccacggttacggttattacagttacggtttactaaccatcagttacggttataaattttttttaaccttaaccttaaccgttatatatacggttaaaacggttacggttaaatacggttacggttaaatacaattacgattaaatacggttatggttaaatacggttacggttaaatacgattacggttaaatacggttatggttaaatacagttacggttatttgataattatgatatagttaatatatgagacaaaatattatatttttaatctttataataaaataaataaataaatagtgatatatcaaataatatttattttatatgaatatgtgtttcaaatatttatatagtgaatcagctatctatttttcttaaataaacaaattaatggtcataattataatgattgaatttattatatttttcaaacaaaaacaatactaaagagaagatgttgtgaacattaagaaacatttttaagagtataaataataataatatgaactacttatgatttgatttatggtaaaaagagtagtggagtaacttcgatcgtagtagttggcatattaaacgatttaaattactattttagtgaaataattatttatttagaattatatacagttacaactatatttttaaggttttaacaatacggttaaccgacggttttgatacggttacagttaattaacggttacagttagtatattttcttaaccgtaacggatctattttcacggttaacggttacggttattagccattttatacagttacggttgggttacggttaataaacggtccggttacggtccaaaatacggttacgattagattttggtcatgcctacacacggttgtcaatttttaattcattgaccatgaagtagtgaatacatcaaatcgagtgcaatcggaaaatgtgctcctgcaataagcaatatgtagatcaaaagaagctacgcactaaaaccattttggttgtattctatgttttacattttttctttgagaacctctttttagctatgttttttattttcttttgtaataatataaaatgtcattttttggatcaaccggtttaagaggtttagttttcataaaagagttgtgtaatgtaagtattatatattttggttgaaacaatttattgtaagtaattctatcaattatgataaattgaatatatacaagtaaacctaacatgtttcttatataaactttgctaaatacaagtatttgagtgaataaggtctcagtctcattcatcacgttatttttttttgaaggattctaaatttcaattatgaactcaccatatcgtttgcatcaacatttttttttaattgatcgtttgcatcgacatgtaatatattatgcatatgaattggtacaattttacatttaaaatctttattccttttcttcgatattaattgtgtatgtcgcatgtgtatatcctaattccttatacaaatattttttttcctttccttttcaattattataatgtaacatataatcaattaaatataatctacagattctatgatctatatataaacgaggttatactttacaggtcacgtcaccttaattatgatagaccttgcggacaaaaaagataaagaacaaaagacacaaaaaaaaatatctcaaataacaaatctaaacaaataaatattatattaaattaggttgaatcttaaaattaacaatcaaattacagaatcttaaacagaaaactattaaacaaaaaaataacataataaatacaattaaactcttattatatttttggtaactcttttaaaaatcaatattatagtatatcaaaataagtgttaatcttctttgatacttttaagtgttaatcttctttgacacctctaaatgttaatgttctttgacacaaagttattcaattacatatgttttacaggttaaatttaaaaacattaaaaatttgaattatataatttaaatacaaaacattatgaataaaattcaaaatattatcccattgtgtaccatgggtcaaatctacagtattagacttactaatatcgtaaacatacgactcactaaaaaccgtacacaaacgtatcgaaaattattaactaacacaaataacaacaaacattatacataacaaatttttcaatttataaaagtaaaaataaataaaaaatacttaaccagcggtataccgtgggtcatatcctaacaccctttcctttatctataattccagcaccatcaacaatgtctgtgatctaagcattcttcacctccttagtagcgagttcatcattaaactcaggttcagatttctccaaatccaacggctgaacacaaagctttttggaactggatgattgttctgagtctgacaactttgtagtataaacacgcttagataatggagtcactgagtctgaagtctcctaactcaaagttaacataagacactgtaaacacgaaaatatagtttagaaaagtttcattgataaagtttcatttacacctgatttgttaaggataacatgtgtagaatcatacctggtccctagaaataatggatgcagggttgacagagtattctaagtcttccaggacctcatcaccacatagaccatcgttagacaatagccttgtgaccttaaaagaatccttactatcccatatgttttctttctcaacagagaccagaaataggaaagtcttcccaaccaaatttcttaaaccgtcagggacatcatttggatcctcagtctaaatagtgagaccatatattgttagttatactcttgtaacatgttagattcagccaaacactataatcaaactattttgatagtataaatacctcattaaaagagccacctaacatggatgtacatgattcaccaaccatgtcagcatagatggtatcaaacaagaggcatttagtttcaccagtgccatccatgactttcacataaagcatgtacctactttatgtgtgcattggctagctgagttagtaaagggcatgaactatgaggtataattacttggcttgcacattagtgacagcattcttgtagacatcacaccaaaaccttggttttgatgacttcagtgaagttgtgttaacaccagcatgaatgtgagtcactttcttgttgcaattacgacaactaaagtaataccatgaccaatccaagtcaagagcatagatggtgcagacaaccctaacctttccaatctgaaattacaaatttatataaataagtatatgataacttcaaatttatagtacatgtatattaagaactcaaacctccatagaatgaagcagatcacagattgacttcctctcatattgcttacagtcatcatcctgtttcacagtaaccatttgaaactttggaacactctcacgaaaagtgagagaaaaaccatcagcatgtaaactgttcaataacatcatataaacggaatgtgagttaaaaaccattagcaaataaacaaatgatcaaagaaaacagaccgagaaacaaaagcttgaacttcagggaaatccgggttgatgtggacttgagatgcatcaaaggagttagacaaactcctaactcctacatacacgaaaaatagaacatttatttcaggtaataattgttagaattggtgagtaatgtcaataaagttgataacagacatgtacctttgtaagacttaatctttgcaaagaccatcagcagattcacatgcattaaaaacactctgagcaaatgctccccacaaagtacgggacattatctcatcactaaaccaaacaatatattagagagattgaaacaatagttgcattcttttgctctaaacaaaaaaaactaggtacatagacttacgtgtcgtcccttaattcgaagtcaagctttgtggtaggtttgttgttagcctcgagagtctcaagctcacctatattaaccacttgaccataacatcttatataactcaaattgccttaggcttactcccacaaataagagatcgtcgttagcacttaagggtcaaagtccactgagctctcgatgttcacacaatagactaatgatgttgtttaataagctaaatgaagtaattgaatgtaaaagacaaacaagcaagtaaatgagttgtagattcaagtgattaaagcgtcgggtctaaggaattgtcttgggagatagaaaaattgtagatctagctaatattaggattgttatcgcaccgttctcgaactcaaactatgattctaaatttaccggtggcgttccgcaaaactctctatacataaagctaagataaccagagaagccgaaaaatcctatgctaaagcatgcattgttaataagctcgattagttcacctagtttcttaaatgcctaggctcatctatgatggttcaaataacaagtacctatgacgggcatacctattatctaatatcaagttctatgtgatcaatccaaaactagcaataagaataatcaagatgaagaactctaagaataatactaaggggttttcgatctactaatccatctaaatccctattgagactccctaaacccaacaaggtgattactcagacatgacaatataaacaaaaatcataatctgaatagttttcattgatgaattaagaataatagcaaagtagttcagaatcctctctaaagggattggattcttctctcaaaatgtgtaacaaaagctaaaagaacataacttaggtctaacaatgaccaaacaattaggtatattcgtgactaaaaatgtgtagggactattttgcaaataaggaaaacttcagggcttctcaaagacttggtagaaaacgagaattcccttggcagcaataagagtgtcgatcgacacaggtgtggtgttgatcgacacaagcttctgaaaaacgtccttcaagatcttcattgttgaaaagcttccaaaattccttattgtgctccatagttctcagatgtgtaagtgtacctgaaatgactcaaaacatacgaaaaagactagaaagactctaaaaaccattctgaaactatgttagaaatcaataaaaaccaggatatatcaattcccccagacttagcttttgcttgccctcaagcaaaacaaaaggttgaatctgtgaaagaggtttgaaaaacatagaaactcccaatctctctagtttattaccttgatcatacaaaccaaatccatgcactaaacaaatgtaatcaaatcttaaccaccatataattctccgttagcccacacaacatcctagattccataccaaagcactcaactatatccactaggctatcatagctgggtctcatcaatcaagtaaatgcttaagaaccttctagactcattcatgtactataccatgataaatcgaccattctttatataatattatttttttggtgttctttctctcccccaaacttattctttttagagagtaaacaaaggggaactcgcatactggatcgacaccctcgacatttttccaacctttgtaattgatcgttccaaataatgtataataatggggtcataggaaacattcctacctctatacactatccgaaagttttctcaatctctcattatttattatttattttttttatttggggagaggaacactttctttttaacgcattagtcgacttatcaggtatgaacagggagtcaagtcctatgagcactaaccgttttgatgagataaaaggaagagcagtgagattagcttcagcctttgtggattatgttgggaatggatgtccttaagtttgttgattggctttctggattttccattagtctgattgatttgaatctgcagtacttaagcaatccaggcaataaactcgagagatagatcataatttcagacaaaagttttgactcaataaaacgactatctaagttaaaatgacacaactgactcataagaaaagaaaagatgaagttagtaattgactcccccaaacttagataacactgtccccagagttattaatctagaggaatcgaaagagaaataatcaaaagtcaaaagttagaaaacgtgagttgccacctgagaatggtgtcgatcgataccatgttggtgtcaatcgacactctggtcgtttcgcttagctttgtgaattctgctcattgttgtagagccttggttagtgttttcacatggatcctccagttagactgttaaatcactaaaacacacatcaatagttccaacaaagcataagaaaataagtgcaacaagtttcaaaacaaataaccaatagtctgaaataaagcaaaaacaaagtcagaaaacaaagcaagataaggaggatgactagtcctcatgctctgagtcggaggtgggtgcgggagagcgacgacgacgacgagtgggagcaacacaaccgtaacgagaaagtgtagctatggcgttccagacgctcttgaaactatcaacgacgtactgctgaaagacctgtggctccatcgagatgggtggaggagaaggcaattgatatggaagagcggatgaggaagatccaactcttggacccccagcagggtcaatgaactcgtcctcggtctgtgtaggcgcagatcctgcagctgaacctctctgtcgcctggtgcgtggtgcggcatgcagaagagaaggatcgggatgaaagcctatctcctcatgctctcctgtattctctgtaagtgcagggcgaggtaactgaatcatgtgctgacctctatcatctctgaagcaccacagtaagttgcctttaagccggtgagagttcttcaggtaagtctcgtccatagtgacacgtgtggtgttgacttcttcgccctcaaagctgatgcgaaaatgctcgaatatgggagtgagaagcctgccaactctctcagatttctgtcctctacctgtaaagggcttggtcttgagaaaaaccaagttatgagcgaacacagcaccaagttgacattacggtcaacctgctcaaatccaaggctgtctagaaagaagtcatgaagagcgtgatagagcaataacaactcagaaagtctcatcttgctaggctccatcttgcacaacagtgtgctactaatcagcctaaccaaatatcgcagaacagggtgatggatccctaagtgtacagcgtccttaaactgaccaggcaggaaaactccagtgatatcattgtcaaacccatagatgtcacacaaatctcgcagtggtaaacggtatctgacaccgcgaatgaagaagataagagctccttcctgagcgttgcgtttcctgtcattcacataagaaaccctaacagaagtcatgaattgtttaaccacctcaggatacaaatcgtactgtctacaagagatggttcccaaacctatgtcatctaacattcctaaaacagatttctctatctacaaacgctgcatcaaaccaaaatccgcaaaccgagtaagcaaaatttcaacactcatctaggcattatagaacagagtatcataatcatcccaatctggacaaaaatggcgattgatatagtcacctttagtgaattccctgttgacatctttctcccaaaccctttgagaaggaattctctcatttggaagctttggccatggaaatcgataaacaggaggttgaggggctgcagcttgggattacggttgggatgggtggtgaccggcggcggtggagaagcgctggcagcggtgagggacggcggaggaggaggaaggtccgacgctcttcctcgccttctttttctgccctgagattctaattagttgagcctgaaatcacaacaaacggtgaaaaaatgaaggatctaaagtggttttagtgaattcagcggttttagagagaaatgaaatgaaaaagatgaagttttaggttaaaacgacttacctggaaaatgagagttcgcgtttttggtcgacattatttttattatttttttcaatggtcctataaaatcaaaaatcctaagttaagaatcaaatgaatgaaataaataaaaaggagaaatacttaccagtgggttgcctcccactaagcgcttgtttatagtcaatagcttcactctgcagttgcttaatcaacaggtgagtcttgacgatccaaaggcttttctactggaatctcagcttcagtccagtagtgtttgacttatgtccattcacagcaaatggttttccattgttgtttttgagaatgactgtttcgtatggcctaaccgagtggactgtgtagggacctgtccaacgagaagacaattttccaggaaatattgtcaatctagaatcataaagaagtacctggtcattaagcttaaaggtccgagtgaggatcttcttgtcgtggtaagcttttgtgcgttccttgtagagcttcgagttgtcataggcgtgaattcgtattacaacaagctcattcaactgaataagtctcctttctccagccgatttgatgtcgaaattaatcatcttgactgcccaagctgctttgtgctcttattccactggaagatgacaagctttaccatatataaaatgaaaaggtgtggtaccaagcagagttttgaaagctgtcatgtaagcccacagtgcatcatctaacttgtaggaccactcctttttcgccttacccactgttttctcaagaatttctttgatttgcctgttggaaacttcaacttggctgctcgtttgtggatggtagggagtagcaacccgatgcttaactccataatgtagaagcaatttcgcaagaatcttgttaatgaaatgcttacctccgtcactaataattatgcgtggcactccaaaacaagggaagatgatagacttgaagagtttcatgacaaccgctgaatcgttcttcggactagctatagcttctacccatttggagacataatccacagctactaggatgtagagatttttgttggaagacgggaatggtcccatgaaatctataccccaacaatcgaagacttcgacttcgagtataaatttatgaggcatctcattacgcttgctgatctttccccttctctgacaagggtcacattgtgatatgaacttctgagcatcccgaaacattgtagaccaccaaaagcctgcttgaagaactttggatactgtcttgaaagttgcaaaatgaccaccatagctagagctgtgacaatgtgatagtatatcaggaacctctgttgcagcaatgcatctcttttaaactccatcagaacaatgcttatagagataaggttcatcccaataatatcgcctaatctctctaaggaatctctttttgttgtaatctgtgaacttatcaggttccacatctgcagctaggtaattaacaatatcagcataccatgggtaatctttctcgaccgctctgacggcgcaattctcagttggtgacccatttctcatcgattcagaagagtgtcgatcgacaggtgcagtggtgtcgatcgacaccatcacacaacttcgactatctacttcctctgaaatgtgagtgtcgatcgacataatgggagtgtcgatcgacattgaagctcgattctgcaaacttgatatagtttgcagtcatcttcttagttgtatcagtcatgtatatgttctcttcaggcaagaaatcgtttatagagacatcatcatcgatcctaatgcgtgaaaaatgatcagctacaccattctcaactcctttctgatttctaacctctatgtcaaatttttgaagaagcaaaatcctctcaaaagtctttacttagcatcctacttttgtatcaaatacttcaaggcagcatcgtctgtgtgaacaatgaccttggatccaacaagataagatctgaatttctcgaaggcaaacaccacagctaacaactccttctctgtagttgcataattcctttgagcatcatcaagagttctacttgcatagtagatggcatgaagcttcttatccttcctctgtcctagaacagttccaactgcaaaatcactcacatcacacattacctcaaaaggtaaatcccaatctggtggctgaacaattggtgcgctgatcaaggcttgttttatctgctgaaaggcatcatgacactcttgtgtaaactcgaatttgacttctttacagagtaaagcagtcaatggtcttgcgattctgctgaagtctttgatgaatctcctgtagaaactagcatgtccaagaaaacttttcactgctttaacattatcaagggcttgaagacttgtcatgacctcaatcttagctctatcaacttctataccatgctcagaaatcctatgtacgagaactattccatcctgtaccatgaagtgactattctcccaattcaaaactaaatgtttctcctcacatctcgcaaacactttgcagagattctccaagcaatcctcaaacgatgatccataaactgaaaaatcatccatgaaaacctccatgatatcctcaatcatgtctgtgaagatagacatcatacctctttgaaatgttgcaagaacattatgaagaccgaagagcattctcccataagcaaatgtaccataggggcaggtgaaagtcgttttctcctggtcatctggatgaatcgggatctgaaagaatcatgagtatccatcaaggaagcaatagtacttgtgatttgctaacctctccaacatctgatcgataaatggtaaggggaaatggtctttcctggtagcagcattcagctttctgtaatcgatgcacatccgatgtcctgtgattgtccgagtaggaatcagctcgtctttctcattcttgactactgtaacacctcccttcttagggaccacatgaactggactaacccaactgttatctgaaattagatagataatcactgcttccaacagtttcataatctctttcttaaccacttcttttagattcggattcagccttcgctaatgttcaactgaagacttagactcatcctcaaggtagatcctatgcatgcatacatctggagatatacttgcaatgtcatcatgagaatagccaagagctttgcgatgattgcgcagcttgcttagcaataaggtgagctatgcgggattaagagaagcaatcacaataaaaggataagtagaattttcaccaagaaaagtgtacttgagccctgctagaagtggtttcaattcgattttaggagcctttgttggatcccaatctaaagtagtagtcgacgttgaagtcacagatggaagagcttcttcaactgtaagttgcatcacatgttcggtctcatctagcagcttagtatatgtagaagttttgctgtccaaatctgcactatcctctatggaagagaccaaaactcgctctagtgggtcttctaattccatctctgaaatactatctgaagctgatgaagtgaaaaaatctatcaaaaaggttttcccttctatgatcggtttcttgaccaaagtgttcatatcgaattggatagtaagatcgccaacattcagccctatcctcccttgtcgaacatctatgattgctccacctgtgtgcaagaaggatctcccaaggattattggatccttaggttccttctcataaggcaagactacaaagtctgtaggaatcatgctctttccaatcatcactggaacatcaataagaattcgatctggaattcgggtagaacgatctgccaacacaagagtgataaaggtaggctcaagattggaattcccaagacgcatagcaactgaacgaggcatcagattcacactaaaaccgagatcacataaagctcttgggaacgaatcgtgattaatggtgacactaagtacaaaagttccaagatcaggtagctttcttgggattcgttcctgaatgatgtcgctgccttgctctgaaatcatcataacactgcattctttcgtcaaattcttagtgaccattgtcttaacataccttttgattgtgggagatagatgaatagcttcaactagaggcatctgaacaatcagtttatcaatcatagccttgcatctgacatcatctaaagcttgtcttgactttttaggaatttggggaagggaattcgccgatttgctgacttggttgcagctggaatttgcacattgtctgaacgaattgggtgtcgatcgacaggagctgggtgtggatcgaaaccatcgggaatagtttcctcctccactacaataaaaactgaatattgatatgattattatagtcacaataaaaagatattcggtcacaataattttcttgtgtcgaaactgaaacgaattttagaatgttacaataaaatcgtcacaaatctatgtatgtctcaaaaaagtctcaaacgaatgtgacgattaacaacagtaacaatttgtcactgattgtgatgacgttattatagtcgcaaaaacggatacaattcgtgacggacgatactgtcacaattatgccacaactagtgacaataaaatcgtaacatacttatcacagattattaccatatttaagtcactggcccgttacattttacgaccaaaatacaatcacaaatccgtcacaattagtgactcgattatagtcacacaaacgtcacaaattgattttatgttgtgacattttttcttactaaactcgtatcaatttgttacaaaactagtttcatgaacaacacatggacgtttggtcacaaacatatgattaccattttttgcttttactaattgcagtcattctcattataaaattataacgaaccatattttatagaaattattattaaacaacatccgataaacaaactacaatacttagactaatagaaaccataatttatagaaatcataaaacaatatccaaataaacaaaatacaatacttaggttaatgcaaataaaacaaaccataacatccaaataaagtcaaactagaaacacaacttaaagaaaatacaaactaaacaatacttaggctaaaaggaaccatacataaactagattaagtggacgttcttggtggtggatttggatctagacattttgacttgcaaaagtctcaacaagtttttccatagcttcaagtattttctgaatttgcagattctcttcaaggctctttttaagatcagtttccatctcttgtagccgatgcgttatcgtctctacttcttctgaagcttgtggtgcacttgaagaagcaccaacagatgatagagtctccattagtgctccaagtccaaatatatggccatgtttagatgatacagcagcctagaatgaaagactaaatatattagcaaaaacagaaaacactacaagtcatctaacaaggcttgtagaacaaatgataaaacgacatgcacatattttttttggatgtgaacttggatatcttttaggaaccaaatttgataaccaattctaaaccggactaatgaaggaacttacttgagaagtaaaaaaaacacgctttataaaatgataaaagttagggccgttgagaagcaagcacaaaacacgtcaacactaaacctgaagcaaacaacactaaacatctaacaagttttataaaacgatagttttatctacacatatcacaagaacaaatgaatgtaaaaccagagactaagaaggctaaagtgaatgtaaaactatacactaacaagcctaaagtgagtgtaaaaccagcctaatgtttagaattattaccttgatataaatttcatttttctcatggttgtcaatagtttcagctctcagattctcttccccagcagattcaagttgacacaagcgttcttgtacatgcttttcataagtgtctgcaaccaaccgtgctcgttgatcaacgtacgagccatcaggtttctgatgtgttttcttcatcacagcaataaaagagtagtcttcattgtttgcttcctgtaaaagaaacaataaaccaaagtgaaacagcagaaaaattatcacgattagaaattaacaagaaaggaaatatataactaccaaaacatctttaactctgagaaaggagcgtgaacccgctcggtgggaatgtgggcctaaaccgttgcgatcagacattcgagaagcacgagccttctcactagttcctttcgctttttcagttgcccaatgcctttgcataatggtccagtagtcagacaatatccaatctggtttttctcctccactttttgcatggcttatcattcctttgaggcgataagcagcaagcttattaaactctttttcaacttgatagttgatggaatcatcctagttaaatcttttctaaaaaacaaagtatatcacacatgatgagtaacattgaaatcacttacgaaaataatctgatgaaatagagcacaaagaataccttaaacagagaaaaccatgatcgtttgtagaagggtggcactcttttccaagatcaccatggtcccttaaaacaactttgaatgacctttcttacagaagttgatacttgagtgtggtgtttaaacctgtttcattgaaattaattaattaatgagtttaagactcagtgaaaataatcaaagaaatatagggaaaaatccataccatttagctccattcaaacaagaaggatgcagcaaaggtaaacttgaacggtccacatatggctcatccataagtacactacaaacacatgtaaattcagaagttatcaatcttgaattcgacaaagcgaaaacttagaaagctcatatcaaataataaaaaacctagagatttcatcatttcttatctatattcagaaatagtaatccaagttgagaactattagcaaaacccagaaatttatttacaacgactaacatgaataattaaaaaaaaaaaaaaaaaactagagacatggagatttgaaagacagtaagagaacaaagatttgcagtttaacatgtagattagcttctaaaaatccagagttatgtaaaaatacctttcaatgagatctctgaagtaaaagacaaaccaatctctctaaaaaaaaggaagtagcgtagagaacgattctgagaggtagagggagatggttaaatagttttgacgcagatttagggattcttattgagtggggaaaattttggcaaaatttaagcggttaatgaaaattttaggtatttttgggaaagtttaaggcgctaatggtgtaattattttccaaaggatctagaatattctcgtagaaatatttactatacttattcgcatatctttttcgcagaattaactaagaatttctaaatactttcctaattctaatatttttacttccaagaaaaactttaaaccaatctgccttgtaaaagaaatgtaccttatccatgttaggaacaagctcttgcagcctcctaatccgatcacttattcacctaacaaaatgaatagagaaaagcttaatgacaaaacaagaatgagatagaaaatagaattggtactgcaaatcatctagcacaaacttttaagaaaataacaaaacttatttttggaaaacttataaattcaaaatagggtttttcgttttttactctagaagctgatcccaattcgttacttatataaattataaaaatgctgcttgcatttcattatatatctcacgaccatataataataaacatatatatatacacataaataaatatttcacattgcagtgacatatacctgaatgaaaaggtatgcgagtgcagactagagacgatgaagttgccggtaaattctcacggtggcgtttaggaacgctctcaccgcgaggcagctgagtttgaggctgaaccgtagctaattgttgttgtctctcacggcgtttagtagcaggaacccacgtgcttctcacgtgagtagaacactcgaagccacggctcttacaacaagttctacacctcatgtgagagcaatctttcttcgcttgattcccaaagtcttgacagctcacaccaccacttcctccgctgccaccactacgaatcatcatcatcgcagcctcctaatccgatcacttattcacgttcttctcacctaacaaaatgaacagagaaaagcttaagggcaaaacaagaatgagatagaaacagaattggtactgcaaatcatctagcacaaactttagagaaaatacccgttcagcaatgctacgaggatgagtagcacaaccacgtttagcacgaaccctacaaggaactgaatcctcaaaaatcttctccatgttcatatccatcattcctgatatcccaccaatcatttgctcttccttctactcacaaaccaaaagggaagagttcttagttaactcacaaaccatatgcacacatagacttaaccatgaacatgaaaacatgtttcatttcacaaaagccatgattcacgatcgatacatagttgacacgagtaggtgacactcatcaaagatggactatgtgtagtgactaatagagaagctttatgaaacattcactttcacagccacaggaaaacaaagaaaaaacaactgcaactagcaggggattttgtttcaaacaaatgcaagttgtcaaattagacaagacaactcttttacatctttattgtctccacaactctaaaattcaaacacccaattaaactataatcgtaaatgggagaagaaacagagggtgaacgggtattttcccaaaattcaaacacccaattaaactataatcgtaaattcaaaacccaattcaaacacccaattaaactataatcgtacaatcaacagaactcgggaactcgaacgagtcacgactcgttatcactctaataagctatgttaaacaaagtttaggttttaaaccttcttcttcatcttcttcgagtagggtttcaatccaagtagttggagctgtacggatccgagataaaccaattcgactctgataggttgaagatacccttagctttcatgaagaagaagatgagaaccagtggaaggagggctcgtaaatgggagaagaaacagagggtgaaaagtgagaactcacctcttatgccactattgtagaagaaataatcagtcgtgccattcttatgtttgaaattttattattgatatttttttaaatcgaaaaaatgagtaaaggacgaaacattcatggcaatccacgaaaactacaagaaaacttaatttgttgggctcgggctcaataaaaaatgtaaatattcggcccagttgtattatttaccttagaaactacagaaaaacctaagtaagaaaacttcttccctttttcaacttctcgacttcttctctcttctctccgtcgttttctctctctcccttctctcgtctccgacgacaccaatttcgccggaaaactcaatttcttctcttcttctttcttctccgttttcggttcgtctttgtctctttcatctccgcaaatttattttccaatggctagagtaaaagactcttctgggaatatgaatcaactagggttgaagcgaccaaagccggcgaaattcctccatcagtcgaagaggccgccgccgagattccccaaagagatgaagaaggcgcaaagcttcttacaacagaagaggaagccggagaaattcagcctacaaccagcgattgtgacgccgccgatttgggtcattcaaacgccgtcggaggggattcaattgacgatttttcagacccaaatgccgattcttgtgaagaagaaaaagagacaacgaatgcagttgttcaacatgatgatgcagcaaataaggtatgagagaagaccgttattttttggattaggctcgttttaggatattatgcattggtaaatgattggatttgtgaatggtgcttcagataaaacaagtagtacaactaggtcgtaaatttgtgaatggtcattcaggaacaagtagtacaactaggtagttaatgtggaattgaaagtattttgaattgaatatgcaggatgatggtgatgatgataacctgtcgcagaatatgcaggatggtgatgatgataacctgccgcagaatatgcaggatgatgatgataatcaaccattgccgccagaagttatgtactttgatccaactaactacacgaaggtgtgtaagataggaacgaggtgtcagttggtacaaacagtggaatttatagagactttggatgcagaactgaagtggtttaggaatcatgaccaatttaagcacatattccacatgcctaaggagcccaatcacatgattcaaggcatgtggatgcttatggttcgcacggcgaagacagaattggcgagagagtgttggtttgttgccaatggagtatctataaggtactcaattaaagagcatgcattgttgaccggtttgaactgccgtgagtacccaaaatactataagactttaggcagtttgaagtttgttgagaagttgtttaagaggactgaagacatcaagattaaagacgtggaagagaagctggaagagtttaagagtgagaagtctactgctaggttgaagttggcaattctgttattcttagctaaggttatgaaagctgattctaaaggggattcgaagatagaggagttgcttcttaggattgtggataatgtcagagcttgtgagacattcccgtggggacgtttttcctttgagaagtgtatggaaggggtgcggagagtaatgaagaacatgaaaggtgtggtgaaacccaaggcacagactgctttttatggatttattactccaggtaagtagtcgagtaaattatatgagtggctagattttgttattgtgaacttgcatttacttttatgtttttgtgtctagattcttacatttgagtgcattccgcatcttgggaagagatttagagaagctgtacctgcagacaaggaatgtccaagaatgtgcaagcacaagttcagtgaaagttgcatgaagggatttactttggaagaaataaatgaagcttttggagatataacagttagctttgttctcttgaaatctatgtttataatctttgtggtgtttgaaatatatgtttacttgacaggatatttcaagcatcttggaacctgatatggatgagagaaagatgttgtcacgcgttgtagagaagcatgttgatgatggtattggatatatcgatccaattgttgatagctggagagagaggcttatcgtagagaaaaagaagattttttggcgtagtctctaccaagcagacattgatggtagacgtattgaaactgttgatgatggtccagctgtacctgaaatccctgggacatctattctctcgttccaggaagctatggagaaaggatttgacaagctcatggacaagcttgctttgatggatagcgaaatcaagcggatttgtgtgagagtacaaggaatagaggaatatgtggcagatcagcttgagaaagaggcagaaaaagcctgataatagttttttagtcaattatcctaaaacaacaatcatgtcgttgtagtattttaggttgtcaatctaaatgggtgtgatgctaacaatcaagatgtgatcagaagtcactaagtcaagccaagcaataacaggttttggtgtgttctagcagtcgtaagtgaacatgcagaaaacagaaattcaagcagaaacagtaaaacacacgaccaacacagctctttgcagagcactgggtgaggtcgagtaacagacagaaagtataacagggatactcgactgcacagtttgttgccagacaactgggtggtcgagtatcaggtcgagtaacagtaaagaattgcagaaactaagcaacagatgacaagatgcagtaaacaacagtagagtaaacaaagaattcaatcagataaagaattcccgaggatggggtaattgagtagtttcgtttcctcagtttataggtgattgatatgctcaataaattaaccctagacaacaagttcattaaccaaatctaagtgccaccgcaacagagactctcaagttaacctagtcacagactcaatcaccattgacgagagctaacctaacatgcattatgaatcaaaaagttaaagccaaaacgctccctgcaaccaataccttggtacagggtcacgaatctctggaattagtggttcagacatttcatcgaacaccttttgggcgcggaaatgtctgggctcaaatttcagttgatcacaaagcaataggcattaagaacaactaatccagaagggatctatcaaccaatactcaatcacctagcatactgagaattctacactactctaactcatcctcagaaacctattcactactcagacatcataacagtaagcataaacgttgaacaagttgaaaacatggtaacaacagtgtaacagcaggatgataacagaatgaacaatagtaaacgaaattaagaacaaaagctgaatactgaatactgaatagataaagagaaatccggattacaaaaggtatagaacacaaggtctgcggaataaaactagataaaaacttcttgtttgcaaaaaatgtgaagtacatgctacttatagccaaatattccgaaaccctaatactcaaaacgacgaagtattgggacggattaagaattgtactcgacccatgtggtcgagtgggaggtcgagtgattagctggagtcttcttttcttctttgtgctcgagtgtctagttgagtgcggaatgaagaaggctctgaagcttgtcatcgagtatgcagtcgagtggtgtgatggtgatactcgacttccaggtagagtgaggaggtcgagtagtggtctagcaatgggatgaagtcactcaacctggtggtcgagtgatgtgaacgagtggtggtcagaagatggggatgaagtcactcggcctgggggtcgagtgatgtgatcgagtggtggtcagaagatggagatgaagtcactcgacctgggggtcgagtgatgtgatcgagtggtggtgtcttctactcgacctgagggtcgagtggtctcttgagatcctgaagctcctactcgacctctgggtcgagtggtttgtcatgatcaggtccgcttcttccagttagctcgtcgacgactccaaatcacctgaaaacaacacaaatacgcaacatgcatgcaaaactatcctaaacatgcaaagtgatgacaaatgatgtgaaatggtataaaacagtgatgatatgatgctaaaatgatgacaaatggatgctcaaaacatgcaaaatacacacttctcaactcccccaaacttagtctttgcttaccctcaaacaaacaatcaagaacaagctggaggtgaggtttgaaagcggggactcagagccaaagcaccagatgaaccagatgaaatcaatgtccaagttgaaagttctaagctgcaagatcgaattctacttaaaaacgttagccatgcctcatcatcaatcaatccgactcatatgctcgacctgcacaagttttcaaatctaccaacccctttaacattcattagttctggaacgtgaatcaagcaatgcatcatcaaagaactcattcggctaaggtaaaaggtcaagagacaaagatggtcccttacagaataggcttcagtaacaggggatctctcaaaaaaaaattaagctttagttgaatgctaaaggtaagtcccaagctatgcatacagagataagatcccatctacctagagtacatcaaatgaagctctaatagtaatcccatctccaatcccaatacaagaactaaattctaccctttgcattcatgaatcttttaagccctttttctaatcattcttttcttttgtcttaactctaggagaagctttctcaacactttgatacatctagcggatttggatttctttaacaactaaggttcctgtttttaacattttaaaaccaagggctttcgcccatcttcaatagctaacaagaactctttcttttcttttcaaatcccaaaacctttactagactttttctgtttctttagcttacttcacctagagtcttttaccttttcttatcaatgaatcaaccctttttttttcttttaaacacatcccaacccaaagtataagcgcccacctagtcctatctagtccgaaaaatgcgaactagaactacatgagacactatctttgtcgttacgaacctaacactttctaccaagcttaatcggaataagacctcacaaacactcacaagtgatatagggattgaaagaaagtctaggtttgggtttgggttaactgctctaataaggagagtcagctacttggattaacaagagtgatctaaatgaataagaaaatccaagtattttagggtatccatgagttcaaatttgatgcagacataataattaaagatcagattcaggttcaaattgatagggaatggtatcagatcatgatagtgtggtcgagtagagcaatctaggcatggttcagttttatttcaaattcattgactacgcaacagacaactagcaatgatggcactgagtttatccggtgaatcaaaatgcttacaaggctatctcatcatcatcccctatgcatatgcaacaatcctaaatgaaacactctagactcgatcctaaatgtaatgcaactacatgaacactctatttttgtgaaatcattttctgaaatttttcaaatttttttggtttttctatgccttagatgaatgcagactcaaaaatatacacaatgcaacacacacttcctgagccctctcccaaacttaaatcacacagtccactgtgtgaataaacttggaagagagtactcaggataaatccaatcacagaaacaaaaaatgaagaaacaaatcacaacagatgatataatacaatgatgaagtgaggcgcttacctcagtcgaagaatgaacgtagttgctcgtcaatggctgcctgtgattgctcccaggccatagacgaaccgccctgttctatctcagctccagcatgtgggtactcgacctcagtgcctctatggcggccagcaccgccatgagtatactcgacctccattcttctgctgcggccagcaccgcagtcgagtgatctcctgccgtggataaactaaaacatggtcgagtatccttcattgctctgtggtcgagtatagtgttgtactctcagagctagaatccacttcactcatctctttatacttatctcctgaaaacactaaccaaatgcatcaaaaacaacaaggaaaaataaagacatgtacaaagatagacatgggatttgctcctacgtgagcttgttttaagtctctaagcttgacttctcatactcattaggcttagggtgggttgtagagaggaaatgaggtctcctctccttctttagtagagtgatcatcatactcattagggtttcttgacaggtctgcaattgggtactcagtggccatgtcctcacagtaagcttcttttttatcaagatagtcttctcctctagaccattccgacgtgaattcacatccttctttgctgacaagtatagtggctccatcgtgaggggcgtgcttaatgttgagtggtacttggttcgcttttccattgagctccttgatttgatcctttagctctttcacaatatgtgttagctcttgtatggctttgtcttgccatttagatctctccttgagttgtaaccaatcatctgacatctgagtgcttgccttgagttttttggtcaagcatgagctttcaggacaagttggaggcttcttcgagttgttggtggaattagttggtcgagcatgtgttgaacttacttcattagctttcataacctttgtgtcagaccccatcaaacccttgtaaacctctgagccaactactgccttgtgtgagtctaatgacttctcagaactcaaagtttcactaaggagatacccacctttaccactattgatcaaaacagtttttgaattatttgctttttcaagttccaatagcagttcaccagctaactgttccacttccttaactaagaaggtttgttcttctattgtcggcttcttcatagcatcattgatatcaaacttcatatccaaattctttcctagattaagatcaatctttcctcgcttaacatctatgattgctccaactgtagccaaaaaaggtcttcctaatatcaagggatcttttggttcttaatccatgtttagcactacgaagtctgtaggcacctccacatttccaatcttgataggcaaatcttctaataacccatgaggtagtctaacagacctatctgccaagatcaaggagatattgcagtatttatacttgttgaaacccaacctcttagctactgagagtggcatgagatttactgatgctcctaggtcacaaaggcatttattgaaagtcaatgaacctagggagcatggtagagtgaatgaaccagggtctcctagcttttctgggacatcgttctcctgtatgatggcactgcactcatggctcagaactgttgttttctgaacctcttgaattctctccatgatcaagtctttgaggaactttttggaatccgggatacgcgttagagcatcagcaagaggtatccttaattcgactgccttgatgttcttggcaaacatagctctgtacttatcttctaactctttcttatgtcgaccaggaaatggaagtgggggcttgtaaggatgaggaatggagactttttctttgcttttgacaacaacatgtttcggatcaattggtgatgttgctgggaaggtcggtcgagtgaagtggtcgagtggcagctcgagtgacaagtcgagtggctgctcgagtgactggtcgagtggctgctcgagtgactggtcgagtggcagctcgagttgtttgtcagcttgatctttattgagactgaaatcctccccatcttggtatgcactgtcctcagttactgacttgagtctctctctagtggataactaacttccactccttatgttgatagcatgaacattaccatactccttgggattctgaattgacttccctggaagtcccgtaactttgggagcagaggtagatgcgaattgtccttctaattatctgactttggaattcaacgcctccacttttgcattcaggtcattgtagttgcagtccagcttgtggtgcaattcggataacttcttagcaatttccatggagctatatgcttgtccatgtagcagttgttggaccatctgttttatttcagcatcaggagcagcaagaccttggttttgcggaggtgcaaacccaggtggtggtggttgttggtagttcccctggaattgctgcttgggaacaaaaccttgattgtagggaacaaaaggtttgttctgaccttgttcttgttgtggaggatacacttgatcctgaggattagcaacgttggtgctgcggtaagagaggttggggttgttcatcttgaagttgttgtaccctttatagccaccttgattgttgatgtagctaacttcttctaattggataacctccccatcttggacttgatactgcttgtcatcaacaaggaagtgcacatgcttctgctggctacgaagaatcttgtccagcttgtcattcagcactttgatctcctttctgtgtttgtcatcagagtcagttgtgcctctgatagttctgtcgcagtcctcgttgtaattaccatctgattgagcaaggttctcaaccaattctcagccttcttcaacatcttttttctggaaattcccattgttggcggtatccagaagcattctaatgcgtggtaggactcctctataaagagtgctgagcagagaggctttagtaaagccatgatgagggcattggttggtgtaacccttgaaacgctcccattcttcacagaagctttcaccagtcttctgtgagaaaccagaaatctcatttctgagtcttgcagttctggcattggagaagaactttgatagaaaagccttcttgcaatcatcccaggtggtgattgagtcatggggcagattcttctcccagatgtgtgctttgtcgcccaaggagaaaggaaacaaacggagcttgaatccgtcttcactgacaccattgatctttgtcaggttgcagagcctatcgaattcatctaggtggtcgagtggatcctccattagcagaccatgaaatttattcccctgaattatcgagatgagaccactcttaatctcgaagttgttgttctggatagcaggaggtgcaattcctttcctctgacggtgatcacgtggtgcatctccagcaccaatgttggcagtgccattttgtttattctgttcttcagccatttcgagtggttgctgaggtacaaggttgactgtgtttctcctttctctgagttcccgagctatgcggtcaatgttgtcgttgaaaaggaggttctgattgcctgttgatcgagttcgcaaacagcaaagatgtacctggatcaagaagacaacaagaaaaacacacagttagtaaccgaaaagaaaattgaaaaagaacttgatcgaagcaagtctgaaatctcaaatgtaacaaacaaacacccaattggcaacgacgccaaattgataataggtttttagtcaattatcctaaaacaccaatcatgtcgttgtagtattttaggttgtcaatccaaatgggtgtgatgctaacaatcaagatgtgatcagaagtcactaagtcaagctaagcaataacaggtttggtgtgttctagcagtcctaacagaaattcaagcagaaaacaataaaacactcgaccaacacagctcttagcagagcactgggtgaggtcgagtgacaggtcgagtaacagacataaagtataacagggatactcgactgcacagtttgttgccagacctgggggtcgagtgatgtgatcaagtggtggtgtcttctactcgacctgagggtcgagtggtctcttgagatcctgaagctcctactcgacctctgggtcgagtggtttgtcatgatcaggtccgcttcttccagttagctcgtcgacggctccaaatcacctgaaaacaacacaaatacgcaacatgcatgcaaaactatcctaaacatgcaaagtgatgacaaatgatgtgaaatggtataaaacagtgatgatatgatgctaaaatgatgacaaatggatgctcaaaacatgcaaaatacacacttatcaaagcccgttatgaagatatgcgtcctggttcagctactgattttgtgccaccgtcttatcaaccaagggatactcagagcaaggccttggttattcacagtggaagccgtgacccagtacctccaactattgagtctctaagtgagtagttttggtgaacttttgtgtagtgatgctttcacaatagttcttacatgtttggttacatatttttgtaggtgatggcagcgatgagtctgatgaagaggataagaagaagaagaagaagaagaagcagatatcgaagaagaagagaaagcatgttggtcctactctggaaactgggaaaaaacgtggaaggaaaccttccaagtttaagggggaaaagtttacagctgaggggaagcaaacgaggaagagacagaagaattaggactttgacttttctttcttgcttatgtgtgtgtgtggacttgtaggtgtttggagaaataggactttgactttctttttgtgtatttgggaatgttatgcgttttcttttgatgttgaacattgtagtttatgtgtagaggacaaacttattttatgaaatggtttatgtgttttaggatttattaaaatcaaatcgtttggctaagttgtcccgtttggccggtcaataatacaagagtggctaagttgtcccagttggccggtcaataatacaatagtggctaagttgtcccagttggccggtcaaaacacacaacttaaaatacaagagttgctaagttgttccaattggccggtcaatacacataacttaaaataggaaaatacatgtctaattaggttcaactattacacaaaatccagaaacataatataattaggttcaaatattacataaaatccagaaacataacataattaggttcaaatgccatacaccatcctcaataacataaaacacatcataatcaccatgtagaaagtaatgccctaagcctatcaatctcgacttctttggcgagtaacctttctttaaggatttcaatttcgccttgcatgagatgaacagtttcccggatggacgccaaagcatgattacatgctagttgtccatgtcttagtgcggaataaggtttgtgatttaccttctcaagctcctcagttaccgcctgatcccaccactgaataaggtggtttcgggactcgtagtcttcagcctgcgaaagagagaagacttcataaatataattcacttgtactttgttgttccaatgaaatgaaaaacacaataacttactttaagcattgggcatttgtagactctgtcgccttgcctataaccagttttgcacacttcaagttttacaggcttaccacaaaaacatttttctggaaccccccaatttgcatcggcattcgcctctccactattccaactagcttcggatgtggatggttgagagtaactatagggcatctacagaacaaagaaagaaagagatatgaatcatgaacgctataaaccctagatctatttgaaatcacggcggctataaaccctagatttatttgaaatcacggcggctagaaaccctagatctactaattacggcggctagaaacccttaagaaactcaatatcataccttggttgttgttgttgtcgtcgtcggcggcggataatgggaaccctaatttcagttgtcgtcggcgatgttgggaaaggaagagagaagaacgagagagagaaagaacgagagagagagagaagagtgaaatagaagagagagagagagaaagagagatgaacgagaataaatagggagaaactttgtagtgtgaacgcaaaaatcgtagtgtgaacgtaagtcgtggggtctatttttaaaaaatattatttattagaatattcagaatacacatagttgtatgtatatgtacagttggccagaatcacaaacagttgaactattctaaaaattgtgtctttgaagttgaatctgaaaatacaactcatttttttagttggtcccataagtttaaacatattaatggattttaataagttttgatagaatcatatttagtaaatatctgttttcatacataacgtatgtacattggacaatcatgaactatatattccttgttatacataggtgatttattaggaaaccagtttatgatcaagtttagtaataacaatgttgtaatatcatattttggatttattcaatgtttagttgttgataatagctgaaaatattgagaattattttatcattttgttaaccctaaaataaagatacatatatcagttgtctcagttgaacttaaaagaatacattaaacttgctaagaattcaataaacttgcaaagaattcaataaacttgcacatattcaatacaaatacgaaaacataaaacagttgtcgaagtttaaaatagtacatcacacttgcaaataatataatacaaatacaaatgaactcagttgtattggttgaaccctttatgcagttggccaggttgttccggttgaaccctttctgcatcagacttagtcttcctcaggctgcagccaagcctccaagtttattctaggttgcgattttctcctctttcgcgcttcaccagctgatggaaaccgcttatcttgatttcatcctggtccttttggtgtgtattccggcggaaaggcaactaactctttaatatgggcaggaagaacccaatccgactcatgtgggactacatacaacgtccggtaataggctaatgcccaactctctatcaagtaatacacagagcagagtccgtagatggttgtattcgcatttctcccttccttgcgggcaaggtgccttgctgcggccatagcatggacacacgggatcttgtctatatcaaaacatttgcatgaacaacttttcattttcaaatccaccagaaaacttaccgagttgagatcaatcacgttgtattcttggttgtaactgttaagctcaatcatagttaatttggctccaactggacatctactgtgcaatatgttctccacagtaggcacaacttgtgatgtgattgaacaagaacctgaatcttgcctatgctcgttgaaccattcagaaaacttagaaatcatcacatcaatcattggtaacaagtgatacttcctcgcttttttaaacacaccattaatggactccgcagaattactagtgtcaatgttatacttgtctcctttaaaatggcacctcgaccatttctcaaaccctactttcacaagaaagtcagcagctttaggccatttacttgtaaaatgaccaaactctttctcgaactcactctcagtatatgcatgagcacaatccctgaacttgtcagcagctccatccttgtcaattttcacatgatctctcatgttttgagacaaatgccatatacaagctgcatgaagcgcattcgggtacaccgtcttgacagccttctttatgctttgatgcctatcactaataaagaccaatccgggaacatccgaatatacagttttcagcttttctaagaaccaaatccaacttacatccttctcgctatcaatgattccaaacgcaagtggataatgatgatgattaggatcttgtgctgttgcaataaccaacatcccaccatacacagttttaagatgagttgcatccacaactatcactttccgcattgccctaaaaccttcaatgcaagcgcctaatgcaatgaagaggtacttgaaccttttctctccttccaactccacataagttactgtccctggatttaccttctctaacatgtaaagataagaaaataacatcgtgtagcttctttccggagtccctcgcacatcactaacatgtagcattttgcctcttaacgcagtggagtatgaaaaatgcaccccaagtcttcctcttacaatcgacataatgttttttggagttggggtctctaaatttccgggatagtcacaatgcaaaaccgatgctattaatcttggtgtgcctcgctgtatactgttgcttgtagtctcaacactccgagagcatgtatgcatctttctatgcactctaacactccaaaaatgagatttcttagttctcgcaactcttagataccaagtacaccctttagaagcttggcagcatcgtagcataagtctcaacgggtctgatttaatagtatagactccaaaaacttcttgctttgcagctctgttaaccaattcccacacagcctcccttgaacaaaattcttgaccaatttcaatacatgtaccatcatctcattctataacctgcggagtaacttctacacttcgtggaatatcgtgaatatcatcataatcaatcctaacatcctcatcttcttcctcaacagaattcaccggcctttccatcggcctttcgactgccacgatctccgtacctactacattctcacaatcattcacatcattctcatatccatcatgcaccatctcacatacttcatttaaaacatcatcctctcttacatttacaccaactgaacttcgacgctccagtacagaaatttccactctcctctcaactcctataccatttaattcctccacatgcaaaacaggaatccgactctcttcatcagattctgttaaaaatatgaagacatcctcatcatctacaatatacgtctctctccgaactttagacagattgtaactcagtttcaacttcatagaagcttcatcaaccgcaaccttcttcatgatcttgtcaactaacatcgaatatgtaatcttctccaaactactcgtcttaaacgatatagcatatagtgaatttttaccaatccactcattcacttcagaatagtatcctccaaactcaaaatgtacgttagtgtggatcttcttcttcatcactcctgaaaatacaaccagttcaactccaatcaaacattttaatagttataccacatgtactcttatcatacgttgaaatcaatctctcgtcgcactcgattctactgaacctaattcgttacctttcaattgatttccaatgttaatacatacctattcgttaaactaattggttaatctaaactttgcaaacacaaaccccaaatctttaatatgaaatctcggaattcaaattcaactcacattcaacctacattcctttgctcatcacctcaaataacgtttcggcaacctctaatcgattactctttactttgcaaaccaatcatcaaactatcatattgaatctgggaattatatataattcaaaatcccaatctaaaatcataatgcaccaatgtcagaggaaatatgagaagaaactgacataattcgttgccttttacgatggattttcaagtcggcggcggccggaatcgatggtggcggacgaagaagaagaacgtcgatgaaagaagaagaagacgtcgacgaaggagagagttcggattcgattttctttatttagcttttgaatatctttttcattttttttaatcaactcattaagggtacaactggtatatcacattttcggtggcattcagattaacagatggcagtctagattaatttttttcaaaaaatggcataagtgataaaaatccgtgaaaagtggctagaagtgaagaaaagaagaagtgtcgagactttgaccaaaaaaaaaataaaaaataaaaataaagaagaagtgtcgagaagcctctgtttcaagtagaattttacaatgtcgtttatttgtattaagcgatgtcgttattaaactcagttgtatttaaatggatcccaaactttagagtttccttatcttatgaaaatcatattattctcctactctaactttcttccgtctcttaccttattctcttctcatcgaattccatttctgttctaatttaggcttcgagcttaacatctcacctttcctcctcctcctcctcctcatcctcatcctcctcctcatcctcatcctcctcctccaccaccgctacttccaccgcttcctccggtgagcccatagattttgtaatttagaattttttctttttttttctaaaccattatttttgtttaagtaaaattaaggtgtactagagccaattttgagataagatgtgtgttttttaatatatagtttgctaataaatatttaataaactttcttttgtttttaaaatgtgaattataaacattcgagacgtattcgttgttcgctccatcagtccaatccgtcaaagttggagagaaaagtattccaacaaacccatgtctcatgtttgttaatgatttaggttgatatgaaaataaaaccctaacttaaaccaagcacaaaccaaattaaatcaacagattcttagactattatacgaaaacttgattataaaggaattgtctgtcacgtataagaatcgttaaaccgagactattgttgattgtatttctctcggttttattctttatttagttgcaggtactaatatattgtttgcgtataaaagttttataaaagttttcgtataagaattgtcgtataattgtcgtataatagtctaagaattcctttataattcctaaatagataagaatcgttaaaccgagactattgttggttttgtttgtcacgtataagtgaatggtcttgtttgttgtgaaggagatgatagctgggtcaattattggtttattagaaaacgttggtttaattggttaaccggagtagtaacgtgaattgatttgttgtgtcatattgaattacgtcttccatccagaaattttattttattttctcaactatattttcaggttatcatgtcttcaaataggaatatatatgctgaaaggcattggatgtatgaaagaatcgatcctacaaccaatcgagtatcacaagctttttatgaaggattggacaattttttgaagtttgcaaaaagtcagcctttatttttggagaataaaaaacttttttgtccgtgtattaagtgtggaaatggaggaagacaacaagaagaacatatcgtgtcaacacatttgttcagcaaaggttttatgcttaactattgggtttggacttctcatggggaagattataatatgttaataaacaacaattctgaagaagatactgttaggtttgagtctcacatagaaccagtggatccttatgtcgaaatggtttcagatgcatttggtagtacagaatcagagtttgatcagatgagggaagaagatcctaatttcgaggcaaaaaagttttatgatattttggatgctgcaaaacaacctatttacgatggatgtaaagaaggtctttcaaaactttccttagcagctcgacttatgagtttgaagacggataataatttgtctcaaaattgtatggactcgattgctcagattatgcaagaatatttgccagaaggtaacaactcaccaaagtcgtattatgagatcaagaagcttatgcggtctttgggtttaccttatcaaaagatcgatgtttgtcaagacaaatgcatgatattctggaaagagactgaaaaagaagagtattgtttgttctgtaaaaaagatagatatcgtcctactcagaagatcgggcaaaagagcattccatatcgccaaatgttttatttgccgatagccgatagattgaaaagattatatcaatctcataatactgcaaaacatatgagatggcatgcagaacacttagcgagtgatggagaaatggggcatccatcagatggagaagcatggaagcattttcacaaggtacaccctgattttgcttctaaaccaagaaatgtttatttggggttatgcacagacggttttaatctatttggtatgtctagacataactattcattttggcctgtaatattgacaccgtataatctgccacctgagatgtgtatgaaacaagaatttatgtttctaacgatactagttcctggtccaaatcatcctaagagaaatttagatatatttctccaaccattgatagaagagctgaaagatttgtgggttaacggtgttgaagcatatgatatttctactaaccagaattttctcttaaaagttgtgctcatgtggacaataagcgactttcctgcatatggtatgctttctggatggacaactcatggtcggttggcatgtccttattgttcggatcaaaccggtgcattttggttaaagaatggtagaaaacatgttggtttgattgtcatcgatgttttctaccggttaatcatagctatcgagggaacaagaaagactttaaaaaaggaaaggttgtgaaagatagtccactggagatactaacaggcgaggagctttataatgaagtttgttgtttaccaaaaacagttgattgcgggagaaaccatggacgattagaaggagcattataaaaggatacagttgattagaaggataagcaaaacattctttgggagctatcttattggaaagatctaaaacttcgacacaatcttgatgtgatgcacatcgaaaaaaacgttttggataatttcatcaagacgttactgaatgtgcagggaaaaacgaaagataacatcaaatcacgacttgatttgcaagagcactgtaatcgcaaagatttgcacttaacacctgagggcaaggcaccaatcccaaagtttagactaaaacctaatgccaaagagatatttctacgatgtctcgaaaaaaatgttaaatttttagatggatattcatcaagtttagctaactgtgttgatctacaaggaagaaaattaacagggatgaaaagtcatgactgtcatgttttaatgcaaagactctttccaatagcttttgctgagcttatggataaatctgtacacgatgtgctatctagtaagtttcaacattcgattaatttattttaatctctctgcatttttctgttatttttttagtttttaattaagactgttgatagcgatattcttatttatgtgaatctattaattttttaattggaagctgagcatgattgtaattttttgcatttttttttttttaaaaatcataattatatagctcgtaaagataaaaaaacatatagatatgagaacatttttaaattatcattaacttttttgttcatattgttttgagaacatttaccatttcttcatataacagttattttttatatgtgtaggtgttagcttattttttcgggacctatgcgcaagaactatacacaaagatggtgttgaaatgttgcaaaaaaatatttgtatgcttctttgtaacctcgagaaaatatttcctccttctttttttgatgtcatggagcacttgctaattcacttgccacacgaagctagtcttggaggacctgtgcagtttagatggatgtattgttttgaacaatacatgggacatctaaaaaaaaggtgaaaataaggcaaaagtagaaggttcgatcgttgagcaatacatcaatgaagaaatttctactttttgtatttattattttgatcgacacatcaagacaaaaaatcgagcaggagatcgacactatgatggtggtaatcaagaatatacacatgagtttgatggagttccagatatattttctcaggcaggaagaggcagtgggaaagaaagtgagatatggctccaagataaagattaccatatcgcacatagatatattttgcggaactgcgatcaattaagaccatttgaaaggtatgacaaaataatttggacatctgtatggttttttttttttttttgtagaattagtaaaagacattgtaaatatttttcatggttatatatgtatatataggttgattgatgagagcttgatcgcggctaatcctaggataagtgaaaaaaatctaaatgaacttagagaaaagcaatattcaagctggttaaaaaaacatgtaagatattttttttttatatgagataaatacttgatagcttataatatagtatgtgtttttttttattgaatcaggtggaggatacttggaaggataattcatatccagagtggttgttgagtatcgttcatggtccaatggttaaagttacttgttggccaatgtatttttgtcgtggatacatatttcatacatatgatcatggaaagaacaaaaagaatgccaattatggagtttgtgtcaaaggtacaacatcttctagctcaaatgaagaagctgatttctatagaatattgagagaaatttatgagcttcattatcctggacatgttgatcttaaggtcgtggtcttcaagtgtgattggtatgattcaaaagttgggagaggtatacgaagaaacaagtcagggattattgatattaaggctaaaaggcattatgaagagtacgatccttttgttttggcttcacaagcagatcatgtatgttatgttccatatccacggatgactcagccgagaaaagatcaacaatgggaagcagcaattatgatacaaccaagagggaaagtattgataaacaaaaatctggatttcactgcaatgcaacatgataacgatgattctattgttgaagttcattcattacaaatcgagacactatcatatctagatgcccaaccagaagatcttgatgatccagtagtagaagccgaagatggatcagatgctgaagatggaaattctgatatcgaattaactagtgacgaatccgaataattttttttttcatttggactttttacaactttttatgtatcatcaaaaaaattgtttccaaaattgaagaagtttttttatttaacattttgttcacaggtttttatttttgtattaaaattggtaacacttatgtcacaatctatgaccaaacgcaaaagtcactaaaacagtgacaaattgtgtcatcgtagttacaaaattctcgtaactatacatgacataaattcagtcacaattatcgtataatttagttaccatatttggtcgcaaatccgtacttatatttatgactatataatttgtaacaaattcgacataattagtaataaacattagttacattcaattaagtcataatattataacgaaatagtaacgtttttatgaccaaataaatacgtcacaattttgtatgaaaatggtcacaattttctgacgaaaataatggtcgcaatttttccgtaagaatattcagtttttttctgtagtgctcctccgcaaaattatcgattccactcgacaaagggaagacagagtagtcaagagttattggtgtcgatcgacaccctggtgtatcgatcaacactggttcgttttctgcaattggaaaagatgaaggctgagctgaccgttcgcgctgaagtattgggttgagctgctttccgctgcgtagtgtgactgcattgataaaagctgatgtaggtgagagattggagaactgagagtgtagattgtcaatcttgttattgatatatgtggagagagaatcatagttgctatcaagctttgtggagagagattcatatttgctatcaagctttgtggagagagattcatatttgctatcaagctttgttagctttgtggagagagattcatatctgcgcaaacatagactccattctggtctctgaagaggatgaaggggggggggcttggattggagcataaattgctgaaattcttcgttctttgtcgaatccttgcgtcgaaagacaagttaaagcattggtgatgagaagtaaagcttcactagtggttcttgttatgaagttacaggagcttgcttcatcaagttgattctggtatggcttgtctatttctttgtagaataggttgatgagttggctctcttggacgccatgttggggacattcacgctgataagacctgaatcggagccaagatgctctaagggattctgctggagcctgagtgaacgaagaaatttgcaaacgaattgcctctatcacggattcatcgaagaagtgaatcatgaatgctttctttgtatcagtccaactggttaaggaacctggttctagttgacgcaaccatgatgttcatctggtcgcaagagagtgggggaagagtttgcaaagaaggtaatcagccggtataccttctgctttaatagaggaaacaatgtcttcgaagacttccaaatgatccaatggtgattcatcgggagctcctctaaactttcctttagatacaagatcataataggcagggtgtatagcaaagtcatctctttcaaaaggaggtagcttgaatgctgatcggtttgtgtagaagagatcagttctgttaaaatcgcctattgtagccgtctggttctacagagggtgtcggtcgacaccatcgtaaaagtctatcatggaaacgtgattctcaatctgaaggtacctgaaacacaagagaccaatagacaaagaaacacgtgaataggtggtagaaaagtagtatctagacttaaaatgacacctagtctaatggtgaactaaaagagaactttggcaacggtgccaaatttgatatagctcaaattgccttaagcttactccctcaaataagagatcgtcgttagcacttaagggtcgaattccactgagctctcgatgttcacacaatagactaatgatgttgtttaataagctaaatgaagtaattgaatgtaaaagacaaacaagcaagtaaatgagttgtagattcaagtgattaaagcgtcgggtctaaggaattgtctcgggagatagataaattgtagatctagctaatattaggattgttatcgcaccgttctcgaactcaaactatgattctagagtaaccggtggcgttctgcgaaactctctatacttaaagctaagataaccagagaagccgagaaatcctatgctaaagcatgcattgttaataacctcgattagttcacctattatctaaaccagagcccttctatgagcctacctgttctttcttaaatgcctaggctcatctatgatggttcaaataacaagtacctatggcggacatacctattatctaatatcaagttctatgtgatcaatctaaaactagcaataagaataatcaagatgaagaactctaagaataatcctaaggggttttcgatctactaatccatctaaatccctattgagactccttaaacccaacaaggtgattactaagacatgacaatagaaacacaaatcataatctgaatagttttcattgatgaattaagaataatagcaaaggagttcagaaccatctctaaagggattggattcttctcttaaaatgtgtaacaaaagctaaaagaacaaaacttaggtctaacaatgaccaaacaattaggtatattcatgactaaaaacgtgtagggactattttgtaaataaggaaaacttcagggcttctcaaaggcttggtagaaaacgagaattcccttggcagcaataagagtgtcgatcgacacaggtgtggtgtcgatcgacaccaccttctgaaaaacgtccttcaagaactttattgctgaaaagcttccaaaattccttattgtgctccatagttcccagatgtgtaagtgtacctgaaatgactcaaaacatacgaaaaagactagaaagactctaaaaatcattctgaaactatgttagaaatcagtaaaaaccaggatatatcaacatctagttgaatacacattctgttaatgagatgaaattttagcgtgatgaaatttaactactggtcatagccttaccaactaaaatagccggatttgagtcaccagtttggatattagcgaaagtagctaatgaaaggtagctagaattactaacagaatcacaccggatgacctgtgtcccagtgacaaaagacatcttgtatagatgaccagtaggtcggaattgacctgatgcatggttaagagcaaaggtttctataaacgtccactcattcaaaggcaagttgtttacatacttgctcaccaagtctttcttaactgatgcatgaatcttgacaccctagtatgaacagaaaacatataattaggaaatgacttcaacatattgcatatttacattatgtatactaaacttacttgtgagtttaccaacactaacttgagtgtttcaccagtcatgttagtgtattgacaccaagagtgaagcaccttcacttggacacgccatgaggtcttgtaaggtcggacatccctcaggaaagcaaaagaggcagccatttgaatggtaagcaaagtttctgatattaaaaatggtgtgatatttgatagactgcaatgtgtagaaatgatatgcaatctagagtatatttatagtgattttgagattgtatacggttttagatttagattatggagtaggcgtaatctttgagaatcaaactgtgaatattctctgctaggatatgaaactggaaatccggtttgaaaaatatcttcgtgttaaagatgattgaatctgatatgtagatattgacatatctgttgaactaaaaaaatatgttttagattgttttggtaaccacattgatttcaagaattcaatatagcgaggttgaaggattgtgaaaagattgcagaatgattcgtgtagctgtagtttgggaggttataatattaactgtcggatttaccatatattcttgatgtgattaaaactgatttagtatatattcttcaatcaaatcgggtaattgaatctcttttgtgttaagtacattgattatctgaatgatcaaaccgagatttgtgcgctcgtttgcaggagcggcaatatttgaaggaatcgaaagtgaggttagggccgaaatagagagcatcaatcgttttgggcccaaaaaactgggttaaaaactgggtaaaacccaaaaaaaaaccgacccaataaaatccttattttgtacttcaaaaatgttaagtagattcattgtttcttacttttcatattccttcttttaatcttaattatcaattttcttttggttgttgtcatcattattttcaccgttcgcttcttcgttatagtcttcatctttattttcctcgttctctttcttactttcttcctcatcctctccaggttaatctatgtaaaatattcgcaattatgtgggttaaaacagagcaataaatttaaacttactaacctaaaccaaacatagttcaataagcctatgaattaactactgaaacgacttagttcatttcaccctctgaattcgaaaattcgatcccttagttcccatctcccgaataatctaccaaatttcaatttactctgagtacattggatgcttatttgttgtctccacatatttggtcaaatctgaaactttaaaatattctcaaacctgttgaagaagttgtttaaatcttaaatctaaaaaaaaaaggttgtttaaatctatatcacacaattcaacctcatgacactaatatcagacacctcatcatcacgttgagctacatatatatgaactaaacatgatcataaaaatgtcatgtcataactttttctcacttttttggccatatttgataatccaagtttgtcttatggtgtcaaccaaatttctctctttctttgtcatttatagaataaaatcaaccgtatttgttacctaaattttgacgtcaattgttcataactgaattttgctcagattgactcataacttaggattaataacttaaatgactctcataattgatggctaactagaatgactcacatttttaatgaaaagactttttaaccttaatcactactaaaaccataatttgatactaaaaaccatactttgattaaaaaaagaaataaaatgattaataaaaagaagagattaaataaaacaaatgtaagaacccaaaataataaaactcaaatcgatttggattttttctcgactctctcttttccctttttgcatgtctcttctttttctttgatttcaaatcgaaaccctagcaaatctccggtggtggcttctcgatccgccaacttctcttctccggtggtggctcctctctccggtggtcgctgctcgagtaggcgatatctcttctccggttgtcgctgcttcttctcacacaaaacagcgtttaactcttctttggttcaaacttttgtagccgccatatgttccggctacacaaacagcagggaatagtcgcggtggcccggattcacttcttcggtggtgtaggtaaactattaacccgcaaccaccgcgattgaataagtccctatatcgattgagtttcgtttgattcagatagtgattaatatttttgttgcagatctgtagatttgttgcagcattagggttgtgggtttcccctttcttaactgctgataatcgtgttcatcgttggttttccactttcttatttactccttatcaaaagcagcttctccagccacaacaacagcggaggtatcgacttcagtgtaagtaaactttagaacccgtcacatttccatttgattttttccatttttcgattggttttccacatttccatgaggcaaatagtaatcaacctgtaagtagctgtcagtttttaattttacatgttttgcactttggatttgaattttgcctttattaaaccgtatatgtactgtgtttttttcagtcttgggtagtagaggagaagtcaggttctgttgatgggttgcctattcaaagagtggttaagaaggctgttaattcagtgaagaacaagaaagctgctacaatggtccttactaagaagaaagtcagttgcagctccgacaacaaagacatttgatgatgatgttgtggatgtcactgacaaggttattgcaaacaatctgaaaatggcttcaagttctgaagaaacattctccaatcctctagatcagatggctaataaggcaacagctgatgcattgagagcacttcaagacggactagataatttggacggtgttactagtaagaggagacgagtgccacaactagcgggttctcagaaatatccgtatgtaggaaattcaacagtgaagagcataatcactgatgtaccatcgtcttcttcggtacatgaacatcttcaacctgtttctgatgaccaatttgataggttgaaggactggctcgaaccagatttgtaagtgtctattttttttcacatagaaatgttttgcgctatcattattcattctttttttttctgcagtgaaaaagaaggcctgaacaccagcaattttagtgcctggttctactggcagataatgactccaagaagcgattgaccaatagaaaaatatggatggctgaaagactatgtaagtatagaaatatattcttaaaagtttttgctttcaattgattaaatcctgtactgttggctggctgaaactatatgtaactataataattgttgttttgattataatgcagcacatgggagcttcaatgtcattgtttcgccgaagattcaatcgtgatccttcaaaatatcccaactagataatagcttttttggatcaagatttgatctccacaatgctcaaagactataaacagtttcaaccagattataggtgcttcaaattcagggagtattatgaggttcaagtcaatggtacagctcaatgtgaagcggcgacaaacaagaaatggtttgttgatgtggatcacctatatgccttcctctttgtcaacgggaatcattgggtcgctctggatattgacttgacaaaaaaacggatcaatgtttatgacagcatctcgagcttgactacggatacagaaatggcgatacagtgcatgtttgtgatgacaatgattgctgctatgttgagttcatttgttccgtcaaagcaacgtaggcaatgtaggaggagctactcaaagttggagtggaagaggattacgaaggtcccggagaatcttgatgcaggtgattgtgctatctactcaataaaatacatcgaatgcttggtgcttggcaagtcatttgatgggttgtgtgatgagaacatgcagtccctacggactaaacttgctgtggagatgtttgaggaattaggtgaaaatgctggaacactacactctgaggttcgtcgcaaggccttcaaattccctagcctcatggatgagtagaagctttgtttgtgttgtttctcaatctattaagaaccatatttcttcttagtctttttattttgttaagtctatgacttttaggacccatgttttgtcttaaatttttaagtacatgtatctaaacccatttcccttctcgtgattttttggtttatttaagcatcgaacatttgcaaatcaggttttagtgatggaaattaggttttcagacttatagtcattttcgtaactccagtatctgattgtaatgttggtttgcattgcatatttctaaaacaaagcaaaaaaaaaacaatgtccgccagctcgggatcgatcgttcccgttctagcagacgattttacttcgtggatgagttttggatcgatcgatcccgaactggggaacatttttttttttggctttgtttcagaaatatgcaatgcaaacagccacgaagacgatgatgaggattattgtcttagaacagaatcatagaaatgaaaatcatcattgagattcaaataatacaaaccaacagaaaaggtaaaaaaaggtcataaatgacattaagccttgcatgtcttacgattgtgtccaatttgcttgcaattgccacaattgtattgttttctaggcttcttcttctccatagcaatctccagtgcagacttaattctcaaaaaaataaccacgcaagatgttgttttattgtccataatgcatccacttgtcgtttaacttaaaatttttaattttattggtttggaaatatttcccaagagagattcatgtcgcgatcttacatgtatgttccttatctcccactgcaactaccagttcccaagatttattagctcatgacacttttagggcacaagcaattgataatgtattcatcggaacaattgaataataattcataataatttatttttaagtaccacataatatatttcccaccaaaccgtatgtaaactccaaaatcataatcattgcctattttctcgtaagttttgtataatttaaaaccagcatagccaccacaagcattcaattattgacagtttcacacttatattgaatttaaggttactaatttaaaatcagcatagccaccacctacagtcaaaacttcttaatgctacaaaattgaaaattacttgcagagtatctagctaataaaacatgtgtattttttgtcgacccttcttctttaagcccaaaaaatatctttaattaaggtcttacaatttataaccagaaagagcacaaaattttacgcaaacaacatcaaatcatttataacatcatacaaaaacacatgttttaggactcatccaaagatataaagcagaaatatcccgacaaagagataagtgcttacaatggccaaaatgattaaaaaaaataaaaagagacgccgttaaaagtagtaaccaactataattgttactagcgactcaaaatttacaatgttaaaaaaaataaaatagaattagatgcatgagactattatttatattgaaaagatttatgcttaatcgaatatattttttgttggaaaataagaagattaacaagaatataagtttattttattcacatattgcttttcaaaaatttacatttcttttttatttctgtatttttattattcatatgttgttttcaaaattttagatttctgctctttacatatataatttttttcttaatatatataatattataatttaaaaacattaactaacttgatgtcaaaagtatcaattaatgatacgactaatcgcgattggtcaattataacattatgatagtataatcaaaattgtgagactaatataaattatttaatatattataataactaaatttatatacatcttgcttcaatatattgtcatattttctcatatttataatttttatatataaaactcataatttttaaaaatatcttttaataagatagttattgtaattaaatggctattttaattaaagatgatgtactattaaatttagagagactaataatattttatttattttcttttataaatttcataaaatagaaatttctattttgatactttttatattgttttgtgacaaaatatttagaaaactttccatatttctaaatattcctttattttatatattgtttttttttcattttacacaaacttaagaaaaatagtaaataagaagaatttcataaatgttaattagcgagatggctacttccgattggttgtttaagatactatgtgaacggtctaagaagcaaatagcttcaatatttctatattatagactaggttatgaacccacgctaagcgttggtcagtttttagaactttgaataaaattttgtgtgactaaaactatttactgaaattttggagaaatatgttttaatatgtcttattattgttaataatttaaatttattgagttttaaaattaccatagtaaataattcaatgtaatacaataactacagataagtctaatacaacttttaggttttacaacatcaaaagaacattttttcggctcatattttgataaatgttgtaaacattttgatatttggatgatcacatctttttacgcaagacattttgattgaatctcatgtaataaattgttgtatgaggaaaatatttgacgactttttcattttggtatctgcaaattcactattgtttttcgtttatcttcactggattagttaatatagcttttctaaaaataagattctatacataaatatattcataagcttatctatacattctttttaacaactcatatttttctcacattcttttcaatatgtatataaatttccatcttcacaactttttccggagagctatcactctttctatctttttgcaagcattcgttttatttgttttgatatttcatacggtgtctcttccatactcttatgattttgtttatgcagtatgtgccttaccttccaaaattttcacatgcttcatatttcttcttcaaaaatccatacctttccttattagtaacctttttttttcaagctcgtcgagatgtagctaagtcaagtcaataaactctttgtttgaatttctatgaatttttttttttgccctatattgtttctattattttgataaaaaaaatttaacttctaaattggttattaactctatcacttctcttctttggtgttgcattttagattctgttcaccttcacgcttcccagactaaaagacatcatcttatatttgttggaacttgattcaaattgatacgattaagaaaaccaccatcaaaccatgccccttgttgctttaacgcttcacatacgaaacacactttaatccctcttcacctcaccttcttatgaaaaaatctgtcacatacttatttcctacggtgtctcttcccatcatcttctgattttgtctaagcaatacatgccctaccttccaaacttttcacatgcttcatatttcttctccttgttagtaaaagtttttttcaaactcgtcgagaggtagctgagtcaagtcaataaactcttctcaagaataaaatctttgttttgctatatattgttttctattattctaataaaaaggttttagcttctaaattggttcttaactttatcacttctctcctgcagtttagatcatcttcaccttcacgcttcccacattgaaaaacctcaacttatatattttgaaactttattcgagttgatacaattaagaacaccaccatgaaaccatgccattgttgctttaactcttcacagaacaaacacatcttaatccctcatcacttcaccttcatgtgaaaaaatcttttacatatttatttcttatggtgcctctatccatcctcttatgattttgtctaaacagtacgtgtgctatcttccaaacttttcacattgctctatattttttttaaaaaaaatctcttactttccttgtaagtaaaatctttttccaagcttgtcgaaagataggttagttaagttaataaactctttgtttgaacttttaagaataaaatatttgttctgctcagttttgttttctattattctaataaaaagttttagcttctaaattggttcttaactctatcactttctcaaaaacaaaattgtgatatctaactactctctcagacccgaatatcgaggagcccttaccactttcttcttccggcgccggtgacgcctcctctcgccggcgtcgggatccaaacccctgtttttctcaccgtcgcttctcttatctagtctccccttttattttctttcttttaaagcttttcccctttgttttccttttgatgaaaccttttcaaacccttccaatcaatgtccctcaccctgcgtcggtttcagactggttttcaaaaccaatagaagaagataagttgagacattgtgctcttcccttctcccactctttcctcgcatctccttggacagaccctttttcggatctggttccttgtgtaggaaaggctgtgaacccctggaacctcaccccttacccgaagcacggccagagcctgtcctcatcgatccttcattcatcggagaagatccatgtgctgcaaatctcttcgccattctcggacggctgtcgcaaccactctctgttttggcatcctgaagagatcctagggttttccccagtggacctagactcttcagttggcccaattcatccaaaaaggcccaagcccatttgctggtttaataactctaaagctttctccctcaggtctgatctcattactcttttgctaagctcattactctctttgtgtcgatttcctctgttctatggtcatggactccatgtgaaagaggtatcaacattgacggtttggcttaccatttatcttatgcgaaccttggttttagctacctttagggctttgtggtatctttgtagagatttgaagatcgttgcgctatttcaattgaatcgttcttgttgatgtgtcttttgtggtattgcattatcttttttcaatgctcatttgccactaagcagatcatatatcgtcttcaagcatcgaaccctcattatcatctccatcttctagaccaattgcctcaccgtctttgccgcatttgaccggagagacccgcatttgctttggattttaaaaccaccctcacctgactatagcaccatagtctcccgaatcattggtatcgtgttactgtgggtaatgcagcttgctccggcgagaatcatatcattgattcgtttgtcaacgtcactatgtctttcgaccgtgactaatctgtcgttcttcgaacccttcgaggatgatctctcgatttaccgtgacctctcatgttgcaatgcgctactttgcccttgcctcaatgctttcatggattttaaatcgttgaacactatctatctttctttggtattggggaatgcctcttgttgtcttgttgtaatttttgagttttttaaactcttttctttgtacttgtttctatttgaatgaatgaaaacaaggtttgacaaaaaaaaaaaaactctatcactttctctcctttgatgttattgtttaaatcctcttcaccttcacacttcccaaactgaaagaactcaacttatatattctggaacttgattcaaattgattcgattaggaacaacactatcaaatcatgtccttccaaactttaatgcttcatggaccaaacacaccttagtccctcttcacttctgtaacgcccgtgaaccaaaaaatcggatagtgtttgtttttaaataatccggtttaattggttgggttaattggaaaccctagagtgtgcgtataaaagaaggaaactcaaaattagggctttagttagccacgtttcgttttataaaggagaaaaagagagagaaggagaaggagcagaatcgttaggggtttgggagaaatcagtttcgtcatatcaaatcgtggtcaaaggtaacgaaatttggtagagttattcccaagttgtttatcgttatgctccaattaacagaacttgatttgaattaaaattggttgagttattcgcagtttcgtgagacacgtcttctcagacgttaattaggatcagcggggattgaaattgagatcctggtctcgtctgttttccgatcgggacgatattttgtgggaagcttcgtgacgtctagggctaacgtttcatcagagcgatttaatagttaacgattagtttgtattttaagatttcgtatttgaggttgtttgtttctgtttttcatgtccaggttgcttccaggttgtttttggttgtgacttgttgtaggacgtttctggactgtttcacacgcaaggagagtctctcctgagtttaattgttattagaatctatttgttaaggtgaatgcgtgaccatgagcttatctgagcgattgggttgtgtgatttgttttgtgtgatgatatgtaggtgtcgtgaatgtgttttgggtgaattgttcaatgaatggtttgtttgtattgtatttgtgattatacccttttatttgcttgtgtgtatagctcgtagatgggaggatcgcctcactaagtattaatgataatacttacgcatctcattgtattattgatgcaggtaaacataaagtgtgatcgtggaatcatggcaaggaagagaggatgatctagaaactcgtttgttttatttttgtgtttttggttattggaacccggttaggattgttagttattcttggttttgttggtcaaattatttatttattcataaaatagtatttttgacttgcggtttaattgttattttattagttggtttaattagatatttatgggaatatttaattatgtttaaaaaaaaaaatgggtcgggttgttttaatttggtatcagagcgatcacggttctaggatgtgtagaaaaaaaaaattaattgacgaattattttcctgatgattgatgttggatgagctagggtgttagcatactgaggattgattatagagtgtttagttaattgtgtgtgttggagtcctagcatcatcttctccgagccttaaatgagattccacggtaagttgtttgtgatatattcgtttgtttttgtttcttagccatttgttcataagtagcgcagatggttagaggagctgaagttcgtggtcgtggtcgtggtcgtggtcgcggtaggggacgagtcctcgagggtaccagcgagagtgatggccacagtgccacggttgagcagagtgtgggttcgcagcctgagtttgtggaggccggggttgggacggtcttggtgtcgatatagctggtgcagccggagtgggggctggtggagctggtatcggtgccggtgtgcatgccgttggtgctgagggcccaggagtgatgggtgccgcagctggaggagtccaggttccagaggttggtatggcggaacagctgaggcagttgttggagcggttaccaggtgtggtaccagtgtaggctccagttgcgccacgagtggcggaggtgcagcagagggttgcggttgctgaagaggttccatcttatttgaggatgatggagcagttgcagatgattgacaccgggtatttttctggtggtactagtcttgaggaatttgacagttggaggtcgcgggttgagcggaactttggttcgaacagatgcccggtggagtatcgggtggatctggcagtgcatttctagagggggatgcacatttatggtggtggagtgtgagtgcaaggagaaggcaggcggatatgtcttgggtagatttcgtggctgagtttaatgccaagtactttccgcaataggcgctcgaccgtatggaggcgcattttcttgagctgacacagggtgaacggtcggttcgggagtatgaccgggtgtttaaccgactcttggtgtatgcgggtcggggcatggaggatgaccaggcccagatgaggaggttcttgaggggacttcgaccggatttgagggtgcggtgtagagtgtcgcggtatgccacgaaggcggtactggtggagacggctgctgaggtagaggaggaccttcagaggcaggtggtggcagtgagtccagcggtacaaccgaagaagactcagcagcaggtggcacctagcaagggcggcgagcctgcgcaggggcagaaaaggaagtgggatcatccttctagaggtagacagggtggtcgtgaaggatgtttttcttgtgggagccttgactacaaggtagcagattgcacgcagcgagctgagacgagggagtgctaccactgcagggagaggggacatctcaggccgaattgtcctaagctgcagcggatgacagtggcagtagtacagccggcggtgcagcaaggagcgcaggtgcagcagggagtgcagcagttaccgcaaggttacactacgcgtgagataggcggtaccagcaacagagcgaatactggtatgatttctgagactcagactttgtgaattatttctgttgttttggatattattgttttgtgatgaatgttagggttcttagcacatgaagtttgtttagggaccttattagtgggcggtgtagaggcccatgtgttgtttgactctggagcatcgcattacttcattaccccgcatgtgtctcgcgcggcaacatccgtggggatcctggtgagcagtttggagccgtcaaggttgctggagggcagtttttagcggttctagggagagcgaagggtgtggatattcagattgtaggggagtcgatgccagcaaatttgattatcagccctgtagagttgtatgatgttattctaggaatggattggttggatcattacagagtacatcttaactgccaccgtgggagagtttcttttgaacggccagaggggaggttggtttattagggagtgagacctacctcagggagtctcgtcatctcagcagtgcaggcagagaaaatgatcgagaagggctgtgaggcttacctagtgacgatatctatgccggagtctgtggggcagttagcagtgagcgacattcgagttgttcaggagttcaaggatgtgtttcaatcgttgcagggattaccgccatcacggtctgatcctttcacgattgagttagaatcagggacagcgccgttgtataaggcaccctacaggatggctccagcagagatggcagagctaaagaagcagctagaggatttattgggtaagggattcattcgtcctagtacttcaccttgggaagcgccggtgttatttgtgacgaagaaggacgggagtttccgcttatgtattgactaccgggggttgaaccgtgtcactgtgaagaacaagtaccctttgccaaggatcgatgagttgttggatcagttgaggggtgctacttgtttctccaaaattgatttgacgtcgggttatcaccagatcccgatagcagaggcagatgttcgcaagacttctttcaggacgagatatggacattttgagttcgtggtgatgccgaaaggtttaactaatgcacctgcagcgttcatgaggttgatgaacagcgtgttccaagagtttttggatgagtttgtgatcatctttattgatgacattctggtgtattctaagagtcctgaggagcatgaggaacatctgaggagagtgatggagaaactgcgagagcagaagttgttcgctaagttgagcaagtgcagtttctggcagagagagatgggttttttgggtcacattgtttttgcagagggagtttcagtagatccaaagaagattgaggctattagagattggcctagaccgacgaatgccacttagatcagaagttttcttgggttggcagggtattataggaggttcgtcaaggggtttgcgagtatggcacagccgatgacaaacctgacagggaaggatgttccttttgtgtggtcaccggagagcgaggagagtttcatgagtctaaaggagatgttgacgagtacaccagtgttagcattgccagagcatggagagccttacatagtgtatattgatgcctcgagagttggtttgggttgtgttctgatgcagcgtgggaaagttattgcttatgcatcatgggagttgaggaagcatgagggcaactatcctactcacgattgggagatggctgtggtaatgtttgccttgaagatttggaggtcttatctttatggcgggaaagtgcaggtgttcacagatcataagagtttgaagtatatcttcacttagccagagctgaacctgaggcagaggcgatggatggagctggtggctgattatgatcttgagatagcttaccatcctggtaaggctaatgtggttgcagacgcgttgagccgtaagcgcgtgggtgcggctctagggcagagtgttgaggccttggtgagtgagattggtgctttgcggttgtgtgctgtggcacgagagccattgggattggaagctgtggatcgagcagatcttctgactagagttcggttagctcagaagaaggatgaggggttgattgcggcttctaaggcagagggctctgagtatcagtttgcagctaatgggactatccttgtgcatgggcgagtttgtgtgcctaaggatgaggagttgcgacgggagatcttgagtgaggctcatgcgagcatgttttccattcatccaggagcgactaagatgtatcgagaccttaagcggtattatcagtgggtcaggatgaagagggatgtagctaattgggtcgtagagtgcgatgtatgctagttagttaaggctgaacatcaggtgctgggtggcctgttgcagagtttacccattcctgagtggaagtgggattttatcacgatggattttttggttggattgcctgtgtcgcgaaccaaagatgttatttgggtgatcgtggaccgtctgactaagtcagcacattttctcttatgattttgttggctaagaaatatgtgagcaagatcgtgaagttgcatggagtacctgtgcgtattgtatcagacagggatttcaagtttacttttgcgttttggagagccttttaggcagagatgggcactaaggtgcagatgagccagcttattatccacagacagatgggcaatctgagaggactatttagacgcttgaggatatgttgcggatgtgtgtcttagattggggaggtcattgggcggatcacttgattctggtagagtttgcttataacaacagctatcaggcgagtattaggatggctccttttgaggcgttgtacgggaggccatacaggacaccgttatgctggacccaagtgggggagaggagcatatatggtgcagattatgttcaggagaccacggagaggatccgggttcttaagttgaacatgaaggaagctcaggatcgacagcggagttatgctgacaagaggaggagagagcttgagtttgaggttggggacagagtgtatctcaagatggccatgttgcgaggtccaaacaggtctatctcagagactaagttgagtttgaggtacatgggtccgttcaggattgttgagagggtgggaccagtcgcatgcaggttagagttgcctgatgttatgcgtgcgttttacaaggtctttcatgtgtcgatgttgaggaagtgtcttcacaaggatgatgaggtgttggctaagattccagaggatcttcagcccaacatgactttggaggcgagaccagtgagggttctcgagaagaggatcaagcaacttcggtggaagaagattcctttgatcaaagtcctgtgggactgcgatggtgtgacagaggagacttgggagccagaggcgaggatgaaggcaaggttcaagaatttgttcgagaagcaggttgctgcatgagtttgcctatccttggtttccagtttcagtgttattgagtttttgagcttttgagttgttgttcttatttctctttcatttgtattttcgtttggagttgtaacgatcatgatatttgatgattaataatatgagtattttatttcttggatttgacttgagttgtcttatttaagaatgtgttgtgcggtttccaaaaatgaaaagtttcccagaaaggacttgtctatttttggaaagtttgagtaaacaacctaagaaaaaggtgtgtttatgagatggacgggagttggtcataaggatgttcacgaggggatatgatggatggtgaggcatagagatgtcttacgcgaatccatgagagagtctggagatatgctcgaaagcgtttagtattgtttgctcgagggacatgagggtcccaacgactcgtgaggagcggggtatgctcctgaggtaccggtaactcgagggacttggtgtctttagagtgcgaggggtacggtggcttcgggtgacgatccgagagcacgctttagggtgacgacccgagagccagttttgaggtattattttctccaagtgtcggaactcgatgactttgtggctgagagtgatccgacacaactcagggattgaccttgagtggggaagataatacgtgtaatacccgagatactgtaggccgaggcctgagagtaacggtttatgctcgaagattgcggtctgagagtggagagtgagttgtgagcaacaatgactagtaaatcgtgagtatatcgactagatagagagacctagagggggtctggttggatggagtgcggaccgtagtgatggttgcacgttgttccttggagtggaagggtgaagctagattcgaggacgaatctatgttagtgggggagaattgtaacgcccgtgaaccggaaaatcggatatgtttgtttttaaatcatccggtttaatttgttgggttaattggaaaccctagagtgtgcctataaaagaaggaaactcgaaattagggttttagttagccacttttcgttttataaaggagaaaaagagagagagggagaagaagtataatcgttagggtttgggagaaatcagtttggtcatatcaaatcgtgatcaaaggtaacgaaatttggtagagttattcccaagtcgtttattgttattctccagtttacagaacttgatttggattaaaattggttgagttattcgcagtttcgtgagacacgttttctcagacgtaaattaagaccagcggggattgaaattgagatcgtggtctcgtctgttttccgatcgggacgatattttgtgggaagctgcgtaacgtctaggactaacgtttcactggagcgatttaatagttaacggttagtttgtattttaggggttcgtctttgaggttgtttgtttctgtttttcatgtccagtttccttcaaggttgcttttggttgtgatttgttgtaggacgtttctggaatgttttagacgcaaggagagtctctcctgagtttaattgttattagattcaatttgttaaggtgagtgcgtgaccatgagcttatctgagtgattgggttgtgtgatttgttttgtgtgatgatatgtaggtgtcgtgaatatgttttgggtgaattgttcaatgactggtttgtttgtattgtatttgtgattatacccttttatttgcttgtgtgtatagctcgtagatgggaggatcgcctcactaagtatttatgataatacttacgcatctcattgtgttattgatgcaggtaaagataaagtgtgatcgtggaatcatggcaaggaagagaggatgatctaaaaactcgtttgttttatttttgtgtttttggttattggaacccggttaggatttgttagttattcttagttttgttggtcgaattatttatttattcatataatagtatttttgacttgcggtttaattgttattttattggttggtttaattagatatgtatgggtatatttaattatgttttaaaaaaaaaaaaatgggtcgggttgtttcaacttcaccttcttgtgaaataatctttcacatacttatttcctacggtgtctctttccatcatcttctgttttttttaagttgtacatgtcataccttccaaagttttcatatgcttcaaatatgttctttgaaatccctttcttttcttattagtaaaagcctttttcaaactcatcgtgaagtaacttagttaagtcaattaattattttatttgaactttcaagaataaaatctttgatcgactatcaatgatcaatagatgtttatttagataccattgctttattatttaggactttattagtttctttggttgttaagaagaagtttttctttacttcattaagcttttctttttcgtttaaactttaaattttcaaactttcgaaaaacttgtgctcggttgattattactctcattttgttaagttttagaaaacttcttcttatatttgaatttctttttccaattctaattatctatattattttagaattaagattttttcttaatttatttggaagctaacatagtgtgactaacaatgacattaatatttctatattttaataactgaattatacattttcttatttcgataactttttttccttttcataaatatcttagtatagaaatttattatttctatattgtaataactgaattatagattttcttctttccatagcttttttccttttcataaatatcttagtataaaaatttgttaaaatttaataatgtaaactaacataatgacaaaaaatgctaattactgacatgtctaaacgcaattcgttgtttaaaatcctatgtggacgtcctaataagcaaatagcctcgacatataatatgactgctttggattagttgtgtaatttcaacagtatagattttttaatatataaagtaatttcaaattttggtaattttaatttattatattaaattttaaaaaattttatttttaaatcaaattttggttaaatatattttaatatgttaattaattagatttaaaaatgtttgacttataatgtgactgctcaggatttgttgtgtaattttaatagtatagatttttttatatataaagtaatttcaaattttggtaattttaatttattatattaaatttcatcaaattttattgaataattgctgagaataccctttccacactacccttttcaattctaccctttcttatttgcaatttttatttgggattattgtcaaaaatgccatttttggcccaaaactaatggacttgccataaacgaaatggtctttcgaaaatgtcattatctatgttgagaaaaatcgattttacccttaggttttggtgcaggagggcagcgatttcgaatccttcctcactccgccgtctattcatcgatttgaccggcggcactgtataatctgcgatttgtgtggctcagattgggtcgggtttaactgttgctggagctgttcatgtgtacactgctacaaaattttcgccttctgcagaaacttgcatcaagtgttcgagaactgcaacgataattgtgtcgacatcgttatggaatcacagatactgatttgtactctctctgcatttcgacatttggccactatagctgtttccgattatgttgtatatggatgactatacatgtcatatatgtaggggatgtgttattttcaaatgttaaagactatattagaagtttatttggatttgttgggtgatatagtgtattgtacctcagggtagttttataatcaacgttttatgcggctgtctcagagatgggtgttgaaatgaagagagggtaaggaactagctagctttgtttttccaaacttgtgtttatggaggcaggtgatgtgcctgtttttgtcattgctagtagctgggaattctctgaaaaggcactacaagaatatggtcatctgtagcggttgaataacgctatcttacgatacgatagcgttttaagaagcgatctatcatcgtccgtgataataggttcgccactttttatagcggtttttggtattgctatcatatttccattatatatagcgttttgttctttgcaatcgtatactcaacaatagcaattatattttgctattatttgttacactaaattgtagtgaaattataatttgctgggataattttttggtttctagacaatttgacaaattaaaagtgaaaaatgttatttttttattatgtaatgaaacagtgatacaaaaaacttacattacaaagtaaaagtacataatgaaaagagaaagggtattcaaacaactcttgtatttaaacttgtgaatgtcccatactcttggacttctaatctttgaaacttcgatcatcaacgtaattacatagtccatcgtattctcacatctctcctgcaaagaaaaacaaaaaccaacatcgaaagtaacagttcatgcttggcgcttcaaaatcttactcatcatatttagcaactataatctcaagagcaaaatacaaataacaaaaccttttcgatagatttcctcatgtaaattgcatgaactgaaatatctcacctgcaacaaatgaaagaacacaaattcaataactaaagttagatatttgaagggattagtcattaaatcaagtatctaaagcatcacattcaaaagtaaacaaaaacgaaaaagatatatgactaacactactcaatttgaaaaaccatcaagatcaaaacaaacacaactcaatttgatttaacttagattaccaagatttgttgaatgtattgaaccttagtctatgatgtaatgagaaatgttgaatgtatcaccctgtttcacattgagacaccaaaaatcagagattcaaaaaagaaacgccgctgagaatcttaccacaccacgaagaatctaaaaggcatgtcatcacttctaatcaacaagagtttttacaatagcaagtctgatatgtgataagcaagaatcaagttcaaaactcaaaacaaaattagatctgaaaccatgcggcctctcaaagagatattgagctactactttgcaaaacatgattgagaagaatagaagctgccattgacgagtacaaaagagaaaaagagaactgagtagtcgcttcaagcataatagaagtcagagactccaactttgcaagaaaagattcaaaatccaatcgatctaataagttctacacatagaacacaatacaaaaacactaaaatcgattctagatctgtactatcttaccttcttctcggcggttgatgaagcaagaacgattggaagggaaaactagagagcgaggttgtaaccggtgaaccattccgacaaaagttaagcaagagcgtcgacgaaatcaaaggcttggagaacgaggtcgtaactggtgatgatgatggaatccttgatggaggtatatgggattggggagaagaaaatttggtgatattagggtttctggaaaaagagatgctggtgaatggaagggaggcggacgatatgagcttatggagagagtgagagggaaaataaatatttttagggttttttttaaaaattttggagcccaattttttactaaggcggacaatgagaatatttttataattttgttaattttacaataacgttttataagttgtatgtactatcacaaagtaattagaacacgaaaagttatggacgcgaacattatttttattgcgtaacatatcgtagcgtttactaatttagaaacgctataaataagttatgtataaatcaattatagcaaaaacacgttaaatgctatcttttagtgctattaatattcatttttcttatagtgaggggatatgggatttctacattgcgaaagaagtttatgcccgaagtatatctatgagttgtgatatgagctacgacgagctattattgcgtgtgcgtacgaagtttgagctagatggacttggtttaaaacccaaattaaattaatggctgtcgtgtcagctgtctgtatttgcagtgaattcaaggcctccagtaatgatcacgagcaacatgagcctcaggaatttcttgagtgtaaaggaaactgcagtgcatctcaatttgttgctttctcttgaaccagaacctcttgaggatgttggcacccgaatgaggcagctttgtcatgttcttgcagctaagacaaacgatataggtggcaataacacctatgctgcttttgacactttaatgccaaatattccaggtttgctggagacaactaagttagatgagaacaagttcggtgggattaggagaaggctgtttctagacaatgaagcttcaggttcgaatggtgcgatcagatttcactctgttgaatcaacttatggtgactcatgtttcactaacaaccaaattacagaagctgtacttgaccatgtcgctgcacctgagcaatgtgccatgatcagactaggagatgctcgtagagcatcgatgtctcatcattctgaagacaatgatacagatggtcctcagtttattcaacatttccgtctgatgttgatgaagattttataagagaagttgaagcagctgagaaccgtgagaatcagcgtcgtagatagtcgaaaggaaaagggaaatgcaaagagagtcaggacgaacctatggtcaaggataataccgatgattccaacatagatggtgtgtgttggtctggttcagatgctaatatttctgatgatgatatttggatctagcatttgatagacatctatgcatttgatgagtctcctcggtttttaggcatggcacatcaagaaggacctgatacagcatcagctattaataggccatcacttgctcccggagaagaggatattgggacatcagtgctggcgtacatggaaagtgccagaaaaaaacgtgatgctgctgatgccatcgttgaaggcaatgattgtaatggaaaacaatatggaaggtttaattcacctaatgtggaagatggggtctcatcaggaaattctggtttcgcagacgttggcacagcgatgggcggaggattcactgtttcccctgcagttggtgttggaaacaaagacgctaggccatcatattcaggctttgctgcatttacatctccaaatcagcaagcaagagaaagtttctctggtttaaatgctgcataccctcgaggaccagcgccttctaatgattttactgctgcaaccccagacgcatcacaagattcctctatatttgaagctgcctaccttggactacaaactgcttcccctgcaatggttgcaccaacccaattcccagtacagactccctatgtatgtgatgctggctacactgaagcagtatctttgggagagtttggtcatgactacacacaaaggcgtgatgcataacctgtcattaacgatgtttttgaactcactaacatagatgtgtgtgcgacggtctcggctgaagaagatgcaatatacattggccgtctgtttaaagataaggaggattttcaaaacactttggctatatatgccatcaagagattgttccatttcaggatagataaattagatctgaagaggtgtcggtggagagtatttgctcatcgagtttcagaattctcagagaattttgaaatccacacagccactcttactcatagctgctcaatattggcccgttcacagtatgagaagcaagcgtcagcaaaaatgattgcagaggtattgaaagggaagtatgctaacgggttgcctggtcctcgtgctgtcgatattccagatataattctagctgagttgaaggtttctatcacatatatgaaggcatggtatgcaaaggaggctgctattatgaaaagccgcggaagtgatgaacagagctacaaattactagcagtgtacttgtatttgttgcagaaagggaatccgggaacgatatacaaactggaatatattggtggaggtttggttccaaagcaattcaagtatctgttcttttctttaggtgcaagtatagctggtattaagtttatgaggaaggttatacttgttgatggaattgttatcaagacaaagtttaaaggagttctaatggctgcaaatatgcaagacgccaactttcaggtgtatccaattgcttttgcaattgttgacgcatagaatgacttagcatggacctggttctttacgcaactgagccagctcatccctgatgcagagtatctagtcattgattcagatcgccaccgttcaatttatgcaggagttagaaaagtgtttcctctagcatttcatggtgcatgtactgtgcacattgaaaggaacgtaagggcgaagagtccggggatatgaatctcagcgcttgtttgtcgagctgctcgggcattcaattttagcgactttaaagaatggtacaatgagattgtcaagcgaagcaagaaatgtgcagcctatttggatgctattccacttgaacattggactcaagcgtattgtcaggctaaacgctataacatcatgagtagtaacattgctgaagtgttgaacggtgctatagcaaaaattgttgagctaccaattgtgtctatactggagtctatcagaataaagctgatggagtgattttgtttcagacgggagaaagcaaaaaaactaatttgtttgtgagaaatcatcacgccaaaggttaacgagctactccttcggcaccataaggcttctgctggtttacctgttaaagctgtttcagaatggagttttcaagttgggtctggcgtaaagcagtactacgtggaccttgcaatgaagacctgtacttgcttgcaattttggaagctggaaatactcttctaccaagctttagctgcagcaagaaagaaagaagtccttgtgacggaattggtaggtaaccattacacggttacacaattctgcggggcatatgaaatgtttatttatcatgtgtctaatgaaagtgatgaagtcatccctccaacagtgcaagagactaaatttctgcctcctaagaacgagaatggtccaggacgtagaaggaagagaaggatcccttctacgggggagtatacggtacgtcaaagtatacatattgaaataagtagacccaatgttacactaatagagattttaatgtgacagggacagaagagcctcaaccgtagaccgcataaatgttttacatgcggtgaaacaggtcataacagagctacttgctctaacatgcctcgttaaggttagtgcagctgtttatagattactttgtagttaattatgcggtattggaattgtttgtgaactttagctgttaatacttgtggtaggttctgtaaaataaaaggaaaaatttttgaaacataagaagctgaataatgtgtagcgggaaagtaattttttttggaacgctaggcagtggcgaatggacacagccctgcagcagcaatatcgaaaggttcttttgtttcttggggagacacgcctgagaataagccctactccatcaagtaactttaatgtatacaccaaggatggttatatccagtttgtataattaagatgttgagcatcaaaaacaaatgatgtgtccggttcctatgaataaaaatgcttcttatggtgtacctgcttattgtaagaagcgtgcaaattgaacaaggaatagaaatacattaaggcgggtacagaacatgctggaaaatatgacatgtcgagataaaaggtgatgagaacatggcctaaaacataaaggaaagtacatgagagaaacaaagtagttgattagcataattcctgaaagcgaattgcaaaaaaatacacaaaacaacgacgacagaggttctcgacagtgttgttgtttagaaaaaagtgagggagatcatagccaaatacaaacgtatagtcaaaccaaccacaccttggtaagcggaaggtagcagtttgatgtaaaaccatttcagcaattgacacagctgcctcattagaaggaatccgagaaaaaggcctacatcgcttgcataccctcgtcataagaacctgaacaaacaagaactagacctagtgaaaaccttgcataaatgctggctggacatgtcgcaccaaggaggtcaaccgaacgcgtaagccttcaacaaactgtgcatctggttgccacgttccaaacaacgcaaaaacaaagggcggtacacagaatctacattggcatgcgaagttacgaaaacaaactcatcaatatcagcttcggcaagaacactgcgatcgaaaaccatagtcaggaagtcaggtccagaggctatcaaagaacctaattcccaaaacccatgatctgctacacggcggacaatgtcaagtgataataggtttctagtcaattatcctaaaacatcaatcatgtcgttgtagtattttaggttgtcaatccaaatggatgtgatgctagcaatcaagatgcaatcagagttcacagaatcaagccaagcaataacaggttttggggtgttctagcagtcctaagtgaacatgcaggaaacagaaaatctagaagaatagaaaagcactcgaccaacacagcttgttgccaagccctgggtgtggtcgagtgataggtcgactaatagacagaaaatgtaacaaggatactcaactgcacagtctatttccagacaactgggtggtcgagtatcaggtctagtaacaggcaaaaatagtaaaaactaagcaacatgtaacaagatgcagtaaacaagtgatgaggaattcccgaggatggggtaattgagtagtttcgtttcctcagtttacaagtgattggcatgctcaataaattatccctagacaacaagtttgataaccaaatctaagtgccaccgcaacagagaccctcaagttaaaccagtcccaaactcaatcaccattgacaaaagctaacctaacaggcattacgaatcaacaagttgaagccaaaacgctccctgcaaccaataccttggtacagagccacgaatctatggaataagtgttcagacatttcatcgaacaacttttgggcgcggaaatgtatgggctcaaattctagttgatcagaaagcaataggcattaagaacaactaatctagaagggatctataaatcaaactcaaccacctaccataatgagaattctaaacttctctaacccatcctcagaaacctagtcagtacccatacatcattggagagaacataaacgatgataagaatgaaaacatgatagcaacagagtaatagtaggatataacaggatgaacaacttagtaaacgaaatcaaaagcaaatactgaatagattaagagaaattcagattacaaaaaggtcaagaacacagtgtctgcggaataaaacttagtttttgaaaatgtaaaatacatgcaacttatagcaaaatattccgaaaccctaatactcaaaacgacacagtattgaatggtcaagtgataagctggagtcttcttttcttccttgtgctcgagtgtctggttgagtgcggaatggagaaaactctgaagctggcagtcgagtatgaagtcgagtgatggagatggtggtactcggcttggtggtagagtggtcgatcgagtgtgtgatgatggtgagactcggccgtgcaatcgagtgggtggtcgagtgaaggtgatggaggtacttgaccagggggtcgagtagtgtgatcaagtgatggtcaggtggtggagatgatgatactcgaccacgaggtcgagtggtcgtgtgaagtgatgaggccttctactcgaccagggggtcgagtggtttgttgaagttgcgaagccatctactcaaccagggggtcgagtgttgatatcgtcaggtcgacttcctccaattagctcgccaacagctccaaatcacctgaaaataacacaaatatgcaacatgcatgcaaaactatcataaacatgcaaagtgatgaaaatgataagaaatggtataaaacagtggtgatatgatgctaaagtgataacaaatggatgctcaaaagatgtaaaatgcacacttatcaactcccccaaacttagtctttgcttgccctcaagcaaacaattaagaacaaggtggaggtgaggtttgaaagcggggactcagagctaaagcaccagataaaatcaaatgaaatcaatgtccaacttggtagttctaagctgcgatatgatcgaattctactcaaaaacattagccatgccttgttattaatcaatccgactcttatgctcgacctacacatgttttcaaatctaccaatccttttaacattcattagttttgaaacgtgattcaagcaatgcatcatcaataaactcatttggctcaggtaaaggtcaagagacaaagatggtcccttacagaataggcttcagtaacaggggatctctcaaaaatgattaagctttagtagaatgctaaaggtaagtcccaagctatgcatatagagataagatcccatctacccagagtataaccaattaagctctaatggtaatcctatctctagtcccacattaagaacttaactctaccctttgtattcatgaatcttttaagccctttttctaatcattcttttcttttctcttaactctaggagaagctttctcaacactttgatacatctagcggatttggatttctttaacaattaaggttcctgtttttaaaaaaattttaaaaccgaggacttttgcccttcttcattagctaacaagaactcttttcttttctttacaaatcccaaaaccttactagacttttttttctgcttctttagcttacttcacctagagtttttttttcaccttttcttatcaatgaatccacccttttttttcttttagacacatcccaacccaaagtataagcgcccacctagtcttatctagtccggataacacgaactagaactacatgagacactatctctgtcgttacgaacctatcactttctaccaagcttaatcggaataagacctcacaaacactcacaagtgatatagggcttgaaagaaagtttaggtttgggtttgggtcaactgctctaataaggagagtcagctacttggattaacaagagtgattaaaatgagtaagaaaatccaagtattttagggtatccatgagttcaaatttgatgtagacatgataattgaaaatcagacagtgaggtcgagtagagcaatctaggcatggttcagttttacttcaatttcattgactacgcaacagacaactagcaacgagggcactgagtttatctggtgaaccaaaatgcttacaaggctatctcatcattatcccctatgcatatgcaacaatcctaaatgaaacactgtagactcgatcctaaatgtaatgcagctatatgaacactctgtttttgtgaaatcattttctgaaattttttcaaatttttttggtttttctataccttagataaatgcagactcaaaagtatatacaatgcaacaaacacttcttgagccctcccccaaacttaaatcacacagtggactgtgtgactaaacttggaagagagtactcaggacaaatccaatcacagaaacaaaacaaagaacaaatcacaagagatgatataatacaatggtgaagtgaggcgcttacctcagtcgaagaatgaacagagttggtcgtgaatggatgcctgtaattgcttccaggccatagacgagtcgccctgttctgtatcagctatagcatgtgggtactcgacctcatcagctctgtggcggccaacaccgctctaaggatactcgaccacttttcttctgctgcggccagcaccgcagtcgagtcatctcctcgagtgaataaggcgtgatctactgctaaagcgaacgaatgtagccttttttctcctcttgtgttccctgtactcgaatgacgaatgtctagcagggacatgtgagactctctactcactaagctcaggcctgtgctgacttggctaaggctcatcaaatctcctcgatggcatgtcccgaggaggttgtccctgtgggatagctgttgtggaagaggagcagctcagcttatctgtcagaaacttgatagtcttgaagcacttggcgagtaacttatcatgtttcttgcaccacttctgcagcttgctgttgttcatgtgagcttcactcaaactcttgctctcccttgtcggaggtacatgctcactaaaatgatacatgctagtttcaaactccacttctctgtcttcatccatcccatcctccgtagcttcttctataagaacatcctcatccaatggctgagcgtcctcgtagtagaggttcccaagcttaggcttaaaatcaatgttatctccctctattatgcgtgtaacctcaagactgggaagaaggatgttgactttcttatctgtagaatgctcaaacttgaaacggtgcatgtcgccaaccattgcgaactccaggaattatcagtgatgtagatgctcgatatccattgcccgtggctcaagtccatcagatgtgattgggactctacaagcgatcggaatcggtgtcacaacacctcctatgcaaagagcgcttcgtgctctcttgtggttattgctaacagcccatctcttttatccacacatgtggatcagaagaagtacaaagagaggtgtgtcattggtttcaccttgaagagacataccattcttggtttggtgaagagtgcctttgagagccatagcaatcatttccatatcagaattggtaacagtccctgttatctctcgggagtagagaacattggctatagaacgctggaagtacctgatgaccggagtgcgtatctaattgctcttggatctagaagaatttagcggtacagagctgccagtggtgatccataagtctttcaactcttgtctgtcatacttgggcttagtacccgttccacttgggaaaccaaacaatccttccaagcgtttgattgatagcctataatccttaccatacacatagaatcgcaagaatctcaatccttcgcattccaaatcatcagaggtcataccttggtaaagctccacttgtagtgtggagaggaactgaatcgtttcttcttcatagggtacatatgggtaagccatcagagtgtcctggtgacaactctggtacaggtgttgaacatcctccagtaatccatgttgtgccagtgtggtcgagcacggataccttgtgctacagaactcattcagcttgaagagcttgatatactcctcagcaggcaatatatcaggtttgtgcagaagtttggtggctatgcgagtatgctcaggcatatactcttcttctagatcctcatctatcagctcatacctctctatcattgctctcttccctcgagctatctcaacttttctcctgaagttatcatattctctctgttctctttctggccttgaagacgattactccgtctcatccatgttatagtctggatcaattgaagaactgccactatagttactcatgattcttctgcaaaagatttagaactcaaaactcaaatgtcaataggttagtttcaaagaaaacaatgaaaccaaaatcgttatcaacagaaaatgaaatagaccaagttggtcgagtacagtctagtactcgagtaaacagaggcgttcccgagttcttcgtttacgttttaacctagtagagcagaacagggtcgtgtacagccggtgaaatcggtcgagtagagtcgttggaatcgagtagctcttcccgacgaatgctccaagggtcgagtagatcctcaggaaaccagaattaacgtcttgagtcttgaatcgttggtcgagtctcaggacgaagtcgagtggttggctgcaggaggtcgagtgctttacggtgaactcgaatcaacaagactcgagtctttgtccggctgtcaagtgaaacttggaactcgattaaggtgggtgagtatttctttccctcagtggccgagtagatttagaaaggtcgagtatagcttgatgtttcgtcggcttcagagatttgcttcttgtggtcgagtaagttctcagaccagagagaagcgattggtggcgaattgctgcgaagaagaaagattgagtttggtcgagtggtggaaaaatgaagagagattggtcgaatgaaattttactccatggttagaatgatggcgatttcaaaaggagtggtggagattgagtttgagattctctctccattttatcttcaaggagaaagcgcgtggcccacactctgttgacttgtctttgaactttgttccctgttgactgggaaaacttcaggaaatcttctgtaaacttgataaactccctgcaagtctctgtagctcctgttggtcgagtataatcatgatttaaaattttttgggttttaaacatcacatatactcgactgatgtactcgaatgcaaggtcttcaagtgcaacagaaagttttcaaaattttgtactccactgggttatacactcgatctataggccttttgtagagtaaaagttttgaattttaactctatctccaagttgttcctttgttcctgagaaccacaaacacaacaaaaacaaatcaaaaatagcaagaaaagtaaaatatatttacacagatagtcatgggactttctcccaagtgagcttgttaaaagtcattagcttgattcctttactcctttaatcatcaagaagttcctggagatgaaccgacgtcacctgtggaaggatttgatctgctaagtatttcttgagcctttgaccatttactgtgaaatctccactcttaccagatagagtgactgctccataaggacggacttcagtgacacagaaggggcccaaccatctagacttaagctttcctggaaagagtttcaagcgagagttgaatagcagcacctgatcaccaacctaaaaatccttcgtgatgatcttcttgtcatgaaaaagcttagttctctccttgtagattttagagctctcataagcttctaaacggatctcatcaaggtcactgagttggatcaaccgcttctcctcagcgttttttatgtcaaagttcagaagttttaccgcccacatggctttgtactcgagctcaacaggtaggtgacatgattttccatagagaagattgaaaggagttgtaccaatgggggtcttgaaggctgtcctataagcccacaatgcgtcatcgagctttgcagaccagtctttccttgtaatcccaacagtcttttccaaaattgtttttatctccttgttggagatctcaacctgtccgcttgtctgtgggttataaggggtggcgaccttatgctttactccatgcttcttcaaaagattttcaaaaaccttgttgatgaaatgctttccaccatcacttattacaatcctgggaactccaaatttcgggaagattacgggcttgaacagcttcagcacaacttttgcatcgttggtaggactgacaatagcttcgacccattttgatacataatctacggcgaccagtatatacttgttaccatatgaagatgggaatggacccataaaatcgattccccatacatgaaagatctcaacttccaagattgggttctgaggcatctcatttcttctgctgatgttgcttttcctctggcatgaatcacattttaaaacaaattcctgagcgtccttaaacattgttggccaccaaaagcatgcttgcagaatctttaacagtgccttgaatgtcgcaaagtgaccaccatatgcggagccatggcaatgcagcatgataccttctacttcatcttctcagacgcatctcctgtagatcttatctttacagagagtgtaaatataaggctcgtcccagtagtaattgtatgtctctaaaaaacttcttcctttcataattgatcaggttgggaggctctactccgcatggcaagtaattgacgtgatcagcataccatggagatcttccttcaacagcgttcagttggcgaaactctttcccgttgtagctcccaccaaagaattctacaaccatgagttgctcttctggcattgagtcgtctatctgaataggttcttcaattttcatccttgacagatggtcagctgcaccattttcaatgcctttcttgtctacaatttccatgtcaaactcttgcaccagaagtatccatctcaacagtcttggtttagtatccttcttggcatacaggtgcctcaaagctgcatggtctgtatagacagtgaccttggatccaaccaaatagcgtctgaacttctcaaatgcgaatacaacagctagaagctccttctcagttgttgcatatcttccttgagcttcatccaacgtccgactggcgtaatatatgacgtgaagcttcttgtctattttctggcctagaacagctcttatggtgtaatccgatgcatcacacataatctcaaacggatagtccaaattaggagctcgaacaacaggagcaaataccaaagcttccttgatggtgtgaaaggatttgaggcagtcctcatcaaattcaaacttggtctccttgcacaatagtctggttaacggcctggctatcttggagaagtccttaataaacctcctatagaacccagcatgaccaagaaaacttctgatatctttgaccgtttttggtggttgcaactgcatcatcacttcaatttttcccttgtcaacctctatacccttctctgatatctcgtgacccaacactatgccttccttcaccatgaaatgacacttttcccaattgagaacaagatttgtctcttcacacctggtcaataccctaccaagattcaacaaacatgaggagaaagaggggccacagactgaaaaatcgtccatgaagacctccaccatctcctagattaaatctgaaaatataaaggtcatacacctctgaaatattgtaggggcgttgcataaaccaaatagcattctcttataagcaaaagttccataaggacaggtgaaagtggttttctcttgatcattagggtgaattggtattggaaaggaaccactatatccatcaagaaagcaatagtatgggtgattagccaagcgttcaagcatttgatcaatgaatggtaaaggaaaatgatctttcctagatgcagcatttagctttctataatcaatacacattctatgcccagttatagttctagtcgggatcaattcatcattttcatttttaacaacagtcattccgccctttttagggatgcaatacactcgagaaacccaagtactattagagatagggtagatgacaccagcatcaagcagtttcaaaatttctttttttgcactacttctttcaagttaggatttaacctcctttgtggttcaatgctagaataggatttgttttcaagatggatcatatgctttgataactaggtgaaattcccttaatgtcagataattaataactaattgctctcctatactttctaagttcagataatagcaggttcacttcatcatcatttaactcagcattaatgatcacggggtaagtagaatttggaccaaggaatgcgtaccttagacctttaggaagtggtttgagatcgaccttcggtgccttgagttttgaccagtcatctgaagttggaatgatcagctctccagagctgctgattatcgaggttgagtgattggtcgagtatgttctcgagtgagcaggttgaacttgtgttgacccttcttcactcattaccattacctctgttactggtccattcaatacctcaaagggttctgattcttccatcgctttatgtgagtctaacaacttctggtatcccaaagtttccaagtgcagaaacccatcttcaccacttttggttaaagcactgttaaggtgatcttcttctgcaagctcttctagtaactcatcagctaactgatccatttcttcgatccaaaagagttgtccttctatggtaggcttcttcattgcatctttgacgtcgaaggtcatcttaaaatctatatcaaggtttaaatcgatcttccctttcttgacatcaatcatagctcctgtagttgctaagaaaggtcttcccaaaattaatgggtctttgggctcttcatccatctctaggactacatcagtgggtatctctacatctccaatcctgattggtaggttttcaagtaaaccatgagagatccttactgacctgtcagcttggataagggatatgttgcaggatttgcattgagtgaaccccaatcttttggcaacagagagcggtatgagactgactgatgctcctaaatcacataggcgtctgttgaaagccaatggacctaaagagcatggtagagtgaatgaaccaggatcactaagctccttaggaacgatcttcttctgtatgatagcactgcattcgtgattcaatactaccatcccttgcacttcttgaattctctccacgatcaagtctttcagaaacttgtgggaatctgggattagcgctagagcgtcaacaagaggtatctacaactcaacctccttgatgttcttggcaaacatagctctatacttatctgcaaatgctttcttgtgacggcaaggaaatggaatctggagtttgtaaggagaaggaacaaagaccttttctttgtttttgacagcaactagtttcgaagatgttattgggaagggtggtcgagtaacatgatcgagtggctgctcgagtgactggtcgagtggctgctcgagtgactggtcgagtggctgctcgagttccttgtcagcttgatctttactgagactgaaatcctccccatcttgatctacactgtcctcagtgactgtcttaggttcctctcttgagggaagtgcttttccactgcgcagagtgatagcatgagcatattcttttggattctgaattgcttttcctggaagttggcttatctgtttttaagcggaagtagatgcagaatttccctccaagtatctgactttagaattcagtgtctccattttgacatttagatcattgtacctacggtccagcttattgtgtaactcagatatctttttcgcaatctccatggagccaaatgcttgtccttggagcagctgttgtagcatttgtttcatatcaacgtcgggagcagcatgaccttggtgttgctgaggtgcaaacccaagtggtacttgctgctggtagttcccctgaaattgctgcttaagaacaaaaccttgattgtaagaaacaaaaggtttgttctgaccttgttgttgctgttgaggatacacttgatcttgaggattagcaacgttggtgctgcggtaagagaggtgggggttgttagtcttgaagttgttgtaccctttgtagccaccttgattgttgatgtagctaacttcttctaactgatttccctccccatcttggacttgatactgctcgtcatcaacaaggaagtgcacatgcttctgctgggtgagaagaatgatgtccagcttgtcattcagcaatttgatctctttcttgtgtttgtcatccgagtcagctgttcctctgatggtcttgtcgcagtcctcgttgtaattaccatctgactgagctaggttctcaaccaatttccagccttcttcaacatttttgttctggaaattcccattgctggcggtatctagaagcattctgatccgtggtaaaacttatctgtaaagagtgctgagcagagaggctttcttgaagccatgatgagggcattggttggtgtaacccttgaaacgctcccatgcttcacaaaagctttcaccagtcttctgtgaaaaaccagaaatctcatttatgagtcttgcagttctggcattggaaaagaactttgccagaaaagccttcttgcaatcatcccaagtggtgtttgagtcatgggacagattcttttccctgatgtgtgctttgtcgcccaaggagaatggaaacaaccggagcttgaatccgtcttcactgacactattgatttttggtaggttgcagagcctatcaaattcatccaagtggtcgagtggatcctccattggcaaaccataaaatttgtttccctcaatcatcgggatgagaccattaatcttgaagttgttgttctggatagcaggaggcgcaatcctttcctctgacggtggtcctgtggtgcatctccagcaccaatgttagcagggccattatgttgattttgtttgtcagcgtcttcgagtggttgctgggtaaaaggttgactatgtttctcctttctctgatttcgcgagcgatgcggtcgatgttatcgttgaaaaggaggttctggttgcctgttgatcaagtttacatacagaagaggtgtaccggatcaagaagacaacaagaaaaacacacagttagtaaccgaaatgaaaattgaaaaagaacttgatctaagcaagtctgaaatctcaaatgaacaaaccaacacccaattggcaacgacgccaaattgataataggtttttagtctattatcctaaaacaccaatcatgtcgttgtagtattttaggttgtcaatccaaatgggtgtgatgctagcaatcaagatgtaatcagagttcaaagagtcaagccaaacaataacaggttttggggtgttctagcagtcctaagtgaacatgcgggaaacagaaaattaagcagaatagaaaagcactctaccaacacagcttgttgccaaccactgggtgtggtcgagtgatagggcgagtaacagacagaaaatgtaacaaggatactcgactgcacagtctgtttccagacaactgggtggtcgagtattaggtcgagtaacaggcaaaaatagcaaaaactaagcaacaggaaacacaatgcagtaaacaatagagagtaaacaaagaaatcaattagatgagaaattaccaaggatggagtaattaagtagttttgtttcctcagtttataagtgattgacatgctcaataaattatccctagacaacaagttcgataaccaaatctaagtgccaccgcaacataggccctcaagttaaacaagtcccagactcaatcaccattgacgagagctaacctaacaggcattacgaatcaacaagttaaagccaaaacgctcgctgcaaccaatacgttggtacaaagccatgaatctctggaattagtggttcagacatttcattgaacaccttttgggcgtggaaatgtctgaacttaaatttcagttgatcagaaagcaataggcattaagaacaactaatccagaagggatctataaatcaaactcaaccacctagcatactgagaattttaaactactctaaccatcctcacaaacctagtcactactcaggcatcattgcagagaacataaacgatgaaaagaataaaaacatgatagcaacagagtaattgcaggatgataacaggatgaacaacttagtaaataaaatcaaaagcaaatactgaatactgaatagattaagagaaatccggattacaaaaacgtcaacaacacagtgtcgaaaatgtaaaatacatgctacttatagcaaaatattccgaaaccctaatactcaaaacgacacagtattgggacggattaagaatggcactcgacctaggtggtcgagtgaatggtcgagtgataagctagagtcttattttcttcattgtgctcgagtgtctggttgagtgcggaatggagaagactctgaagctggcactcgagtatgaagtcgagtgatggatatggttgtactcggcttggtggtagagtggtcggtcgagtgtgtgatgatggtgagactcggccgtgcaatcgggtgggtggtcgagtgaaggtgatggaggtattcaacccaatcgagtgatggtcaggtggtggagatgatgatactcgaccacgaggtcgagtggttgtgtgaagtggtgaggccttctactcgaccagggggtcgagtggtttgttgaagttgcgaagccatctactcgaccagggggtcgtgtggtttgatatcatcaggtccgcttcctccaattagcttgccaacagctctaaatcacatgaaaacaacataaatatgcaacatgcatgcaaaactatcctaatcatgcaaaatgatgaaaatgatgagaaatggtataaaacagtggtgatatgatgctaaagtgataacaaatggatgctcaaaacatgtaaaatgcacacttatcatcaagaagaagcggatgtggaattttatccatgagtgaaagtgattgcgttgatgctgagcaatggcaaccaataatatatatatatatatatatgttagaactgatatgtaaggagaatagggtacataggtaggtctaaaaggtgttgcgtaagtaaacacagtagcattaaaggatgcaggtgaaatagggcgaacaagtgggttatgtcattgtgtattgtctggttgcgtataaatttaagtgaaaggtcagtggtaacatcacaaatgttgatgatagtcagtgaagccaattaaaatcagatgtgaggtgcaaagacaataagaagctggagtaaatgtcacaacagttgaagcaaagatttaaacattacaacaaggttaacaagtgcgtaaggtcgttaaccaaacaactaacagagcaacatgaacataacgctaaaccaataaaggaaacacaggcagcagcggctatcaatgccacacccagtaccaagacatgcaggaatatcatcatatctcctaagtgttactatgagaccgaattttcaccggcctaatttgaagaatgtgccggaaaacagtgctacgaatagcatctgattcacgaaatgaaccagtaaaagtcacaaagctgtcaatggtgtgtagtgcgtccgggtaaaaaccaagacaaacctgtagcaaggctcggacaaaagaagcttgagggggatagtgtccaatggaggataatagatggagaccgtcttctgcacgaccaatttttacggtcagtctaatgctttcaaggtaaacagcagttggattgttagcttgtaaacatttcaggaaacaagaccggtacagagaaccatcgtttataagctcgacatttgtaatgaagggctgcagactaacatatcttaggacaatagggtgggatgcaagagagtgatagaacttggaagccataagcataccaccgagatattaaaaggaattctcaccaacacgttagactatatcaagagcaatgttgatgtcaagagtttccattagtaaagaataacaatttgttgaagcccttgaaacttaaataggcaaaacaatgaaaagggggggggggttgattggttgtaatcaaagtaaatgcaaaagtggatgagcaaatatgaaaaataaatgtcgaggaataaaggttgaataagaagaggggttttgcttaaacatcattatagagaatatagggacacacgcaaggtaaagttataactacagaagtaaattgtaatgaacaagttcgtgaaaacataatgtaagtgaggtgcatgcgcaaatgcttaagaatggaaaacaaataatctcttatatgggagatacataagttgaataaagggcaatggcatattgaagtctaagattgttaacctgtggaacggtgagtttgcacagcggtgtcgaaagctgatgagattggagttcaataaatttgatagccaggaggccacaatcaccaccgcgtagattctgagccaggctaggaattcttaagaacgaaaagccactagcaagccagccagagagaacatcgacacaaacagagcaaagtaaagcaggcaacatttgagcaatatgcgtcatgtaggagacaacttttctagatgaagtcaagtcttggaatgggtcaaggatgtcaatatgacctttgggagtatcaatggctaaggcaacctattgtttcttgccccagttcgtacgcagatagacaatgtcaacatctttaagccactccaacatagaacgcctaccgtcaacaacaccacgaacatatgcaaccagtatggagtgccattgatacgttaaacaatcactatgttagataaaactcataaacttatcgctcatattggaggtgaacaatgagtcaaggacagttacacgactgttggcaaggaaagccccatgtttttgccaaacaaagtcaacgaggcaagccatgtgctgaaattatgtgactgagcacttagtttaaatggagttgttgtttgttaagaaattaaaatgtaattggtaagaaaaagaaagaatattgcggcttacacaagtcagcaaagaaagaagaagggtatggctggccattgatagtgaattccctacatatggaattgcaatagtaagaaaaagtaatgttaagcagttaaaaatagaaaacccaaagaaagttgcattggcacatcaaacttgttctgatgtttacagagtttatccctaaacatgtcaaccacatcattgttaggcgtagcaaatgtaatgagaatattgttcgcattgcttgaggattctggtttgagacaaggttttgtgctgcgcagattatttgcggggccaacaaactctgattgttgtggaggagacggatgacggcgcgtagaccggcgtgttttaactgaagtcacaggaattaacttgcaatttgatggatggcgtttaggcatagacgatgaagcgatggcaggcgggggaacaacaacgggagtatcaacagttgtaggttgagtaacaagtaagggctccaaactaaaaggaggcacatgggtaggcaactgagactgtgaaccagaagtctggcttctgtatttgtcagcctcaaccagcaaagaggaacaacaagtttttttctgctgtacatttacaaacgttatggggaacgaaagagtacaagtgtagaatgtgcacaacacaagtattaactgatattaaaatcaaacctgagtcagtggaaccggactgattgacgggaaaggaaaaagaggaggagcatggctaccagttactgaaggagaggatgcctacaaaagtgaagataataaaacgatggcagagggaaaaaggcaaacaatttgcaggcaaaatctggctttacctgaggaggcgtaacattagtgtcaaaaagcttagtacctgagaatgtacacttcagaggagacacagtgtagtgttttcctttaacaagggagttgacagtgtgcagggaatctagcgcaggatcagagacagctgattgtttaccattaaaggctgagcatctcttgttgtttgctgaacgcgcagagtacgactccgtagacagtccagcacctgcagaacgtgtcacccgacaaggaataactgaacttggaggagaaactgcaagaagggtattcacaaatgcgtggacaccaactgtattctgattattctgctgaaggagttgccgaacctcgtcaaatattgatgccttgaaacttttttgtcgtttatcaatattggtgccaacattagaaggagtgttgactgaagaaacgtgagaaggtcggttattagtttgcatcatgtgttgaggaccagaaatggaagttgaggagttagtagatcgagatttacgcttccgagaagagttgagagacggtagagaagcatcacctacaggccaaaaagattttgtgaatcgaaaagatgacccaataagactctctaaatgcttaacctttgggtcgcacgatgcggataccccaagtgcagtctaccgtggttgtggaaggaaaacttgtatctggaagatataaagaatatcagttggtggagacagatgaatgaaacacatgtaagagataatgaagtaggggaaacagacagcaactctatgttcaagagccaagatgtttgaattgtggtatgtcttgcacttagggagactatgaatggtttgatctaggaaggtgtactgctggtcaccattacggaggtatgtaagcagcgcatggatggtcttaaatgcaaacaactgtatagctagggggaaaccatggacagcaatagaggattgtttcaacttgttaacaagggatgatgtgtcttcaatatatggttcaactttgaccatgcgaagcatccggtggaaagaatggcgaccccatgggtatgtgagaaagaagtcaacatcttttaccatctcaacaacttcagtcgatgccttaacaaggtgtgtacgagagagcaagataccatcaactatgacaataagagcgagccgaaatttgcgcagctcgccatatcaggctcacactttaaccatctaactagttccttcatagtaacaaaaccaggtttcccaccaattagagtataccaataaggggcaaagccttcagcatgagttgttgcagaagcaagttcgatctcagaagttaacgccgagcagtccaaaccagtgacttcatgaaattctgtaagtgaaaacctcaagggctgaccaccaaaaacaaaccacagctcatcattgttagtggtatgcagctgcctacatagcatctgatggactaactaccctgatatggaacactgacggacatgcagagagaaaagagaaccaagaggcgatgacaacaaagtatccaactcaggcataccatgtaggacattgaaaatgtcaagaagatactttggttttgagtatgagttaatgcggactgcatgaccaggatagtgatcagctttgaaaatcctttcaggaagcacgcctacagaaagaggtatggattgtgtgttaatcaccatggcagagacaataacagtaaaatgttgagggattattgaaaggactaaataataggccactaaaccctaacaaagatcacagggaacataagcagagagctaaaccctaacaaagatcacaggaaacataagcagagagctaaaccctaacaaagatcacagggaacataagcaaagagataaaccctaacaaagatcacaaggaacataagcaaagagataaaccctaacaaagatcacaaggaacataagcaaagagataaaccctaacaaagatcacaaggccataagcaaagaggtacacaaataaagttccacaactctgtaaacccaacatatatcacatagactataagcatgagtcaaacgaactactcggtcaccatatgtcaccaaaacacaactaagtcagctactttagacatgtagcagtgactgaacaaacgcaaataagcagcaatgaacctaacaaagatcacagtaaacgccacaccgcaacacaactaagtcatctactttagacgagcagcaatgacctatataattggtaacagttgtaaatgtacaaacctggaggcaggattggagacaggtcggaacggggagaactcatttcagctcagcaaaacctatagagtgaaatcaaatcagagactcgaggaatggtttgtttcgatgcaacagatcgttgggtatagaagttcacataaaagaacgaaattgaaaacagagtatcggcatatttgtcactcgaggacaacttacgaaatggtttctggaagatggaatcccctaagcagcaaataaatcaacagaaaacgacaattgtttggtcaatttgaagaaaaaatgacgaagctaatgaaggcaaagctcagacagtaaacatggcaactgtaggagaaatagaacgatgaagacgtttcaggttactcgggcttctcgggcaggtgagagtgggcagcgcaataatgatagacagagttaaagcaacgagggtaaatgtgtaaaatcagatgatgaaaaaatggcaaatcgacaaattgttcggaaaaggtcatgggcaacaaacaccatccgagataatggcttccccgtgattgattcttttcatttataccctctttaaatttttaatgaccattttccccctatttgaaaattggttaaggtttaaaatgaaatattaatattttttgcctaaaatatttcaaaataaatttcccgccaaaattttcccgtcagatattttcccgccaaaacatttcgaaaaaataattacaaggaattttaaatgattttaaaatatttacaagggatgtttaaaagatttacaagagatttttaaacggtttaaaagtgttttaaaagatttacaaggggattttaaagggttttaaaagacttacaagagatttgtaaagggtttaaaagggttttaaaagatttacaaggatttttaaaagattcttaaagaatttacaagaataccctttaaaaactcttgtaaatctttttaaaaccttttgtaaaggtttacaagagttttaaaatggatcaaaaattattaaagggtttacaagagtttttaaaagatttttaaatggtttacaagggtttttaatggatttacaatagttttaaaaagatttacaagagttttaaaatcctttaaaaactcttgtaaatttttttaaaaccttttgtaaaagtttagaagagttttaaaatggtttaaaagaattataaatgttttaaaatacttacaaatttgttctaagagttaaaagatgattgtaaagactttataagagttttaaaaagattttcaaagaatttacaaaggtttaaatatccttgtaaatccttttaaaattcttaaaaaactcttgtaaatcttgtaatactattgtaaaaagttttaaaatgatttacaaaggtttaaaaaggggttttaaagtatttacatatgtttttaaacactttctaacgattttaagaggttttaaaatattttacaagagtttttaacaactttcaaagtttttaaaaaaaatttcaaggtttttttaaagagtttttaaaaaatttataaggatttttaaaagcattttttatgtgagaaaaaattgttacgggaaaaaagtttggcggaaatttttttttttggcgagaaattttttttttggttggaaaaaagtttggcagaatatttttttcagcgtgaaaattaaatctgtgattacacaaaacaactctgtcatgcctatataacatttttcgaggttaacaaatctgttataacacaacagatttttgggtacaaatagaaaaatgtgttgccaccataaagaaaaatctgcggtatggaaaacaaatcagtgacagatttggtttcaacattcttaattttaaaatttaaataaaatctgcggaaactatatgaaacaaatcagtcatggtaaaaaaatctacgaaaaataaaaatctggcgtaacataacacagtaaagtctgtggtacaaaacaagtctatagtaaaaaatctgtggttgaccaaaaaatctgtgatcgataacaaatatatcgcaacaagagccacagatttaccaaaaacgacgatggtattttcgttaataaatgtagttttattgcaatgctggaattaaatagtaatggcatttctgtaatattttttttctgcaaaggaaaacagggatattttggtataattattactcaaataactcatatttttagcattccttttgggtcattatgtataaaatatgggtcattctagtaattttccctaattctaataaattgttttagcttctaaattggttcttgactctatcaattttctcctttgatgttgcagtttagattctcttcaccttcatgcttcccaaactattctggaacttgattcaaattgatatgattaggaacaccaccatcaaaaccatgtccttccaaacttaaatgcttcacggaccaaacatattctgaaaaaatctttcacatacttctttcatactatgtctctttccattctataattttgtctacacaacacatgtcctaccttccaaacttttcccctgcttcatatatcttctttgaaattctctttctttccttattagtaaaagttttttttaaggttgtcaaaaggtagcttagttaagccaatacattttttgtttgagcttttaagaataaaaactttgatcgactatcaatggtccaatagatgtttatttatatagaaaccactgctttattatttatgactttataagtttacttggttgttcaaaaggagttttcctttacgtcattaagtttttccttttcgtttaaactttaacttttcagactttcagaaaaattcctttcggttgtttattactaactttttgttaatttttagaaaacttcttcttatctttaattttttgtccaattctaattatcgatattatttaagaattatgattttttcttaatttatttgaaagctaacatagtgccactaacaatgatattaatttttcttattgtaatgattgaattatatattttcttatttccatttttatcattttcataaatatcttaatatagatttgttaaaattttaaaatctaaactaacattatagttaaaaatgctaactaatgacatgtctaaccgcaattccttttttattattttaaaatataaagtaattactattttcaaaaatgttaattacttaggcgctaaaaatgttaattattgatgtggcaactcttgatttattgttttaaatcctatgtggattacttagacactaaatatattaattattgatgtggcaactctcgattcgttgttttaaatcctatgtgaacgcctttagaaacaaataacttcaacttttctatagtattgattggcttcatgccttcatctttacgggaaccattagatcaagttttttttttgtgattctattgtttgcttcttctttaattcttgagcgacaaccttttgtttcaattgttgttacatgtctctgatttcagggtttatcatcacactgtttactaatctctctttccaattctgttttcaggttttgattcttcatcttaaccgtttgtcttcccgtgattctatcaaaactggagtaagttgcaaccattacaagccacaaaaagcaaaagcaaacgttactttttttggtcgatgccgaaaattagtattgaactacatctttgtttctgcaaggttttggcagccttaaggttagttagtcctccatatcatttctctaggcatagttttactttgtttggtttcttctttttcttacaaatcaatgagttctgatatttttgtaaacaaaaacagcttatgactcttctcttccgtttgtggcttccaagtcccaacgtccaaataagttcgtttgactatttttagaaactagagtgaaggttagtctgtttcaattgattcatgtgcacttgattgtttgttctatctaaccaacccttaatatcaactatgattctgttcatatatttcatgtaaccgtctcttttattaatcgcaaaagtttgatatatagaggttaattggctttaaaacgttcctcaaattttcttaaaacttttctcctatatatttaagtcgagtaaatgcttaggtcctgtttgtttggccatttggatgaaccatctcaatgaagattaaaactgatgtttgtttttcatgttttaatagatcatctgaatgattatttttaaactcatccagaaaatgaaaaaaatcagactgagtttgatctgttcattctgctgaagatgattcagtcaaaattaaaaaatgtcaataatacccttatctaatttatggaattacaccaaaaaccacatctcctcttcagcttttcctcgacacaaaacagagaaaatcaaaattttgatctcgtgatcttgtgatctcgccgtcgtcgacgagaatcggtcgccggagatctcgtcggatccatcgccggagtgtaacaggtttgtgttgctctctctctctctctctctcgcttcctctctctcgcttcctctctctcattgtttctctttgtatccttgttgcaatcacttgttctagggtttgatcctccttggttacattgtttgtttgtgggtttgctttgctttactccgtggctactttgattcttcgattagctttagtttatggctttgtgttgctttgcttgcttttgattcttcgattagctttagtttacggctttgttttgcttatattgctttgtgttgctttgtgtttttgatgcagaaagctaggatccagatttggcttgaaggatttaaggattgctcttgcttgtttcagatctttggttggtctctaagctcacgtctatcaatcacaatagtttgctcttgcttgtttcagatctttggttggtctatgggaatctaatggtttctcttctccatttgctcttgcttgtttcagatccgttttctttttagggattttgctgcaacggcactgtggttcaggattcagaacttggacaggtaggttatatcaaaacactcttaacaacatgagacatcaaatgccacatcaaataccaattcgttagttttgattttttgttagttataataacaaatatgtacattagtagagtaaccaagtatttactacaccgtgggttagttatagattcaaattaagtggtatttgtagccaatacattagttagcatatgacttcgaatccttttagtatttgatcattagttttttattctgcaatagtgtagtataatatttggacatgtctcagagtatgattatgtcttgcgctttttgttttaagctttctacttcagtttgggatttaacattccaatgtaatatttagtgactttgaccagacaaataaatcttcacacgaatcttttcaagaagccttttttgctttcattattacacatgagagaaaaacaaatcagctaaacataatgtcgtttactatgtctatacaaataagcaatttgtttatagttatctttctcaacgaaaactcatctttactgtgtcttctttatcattgacaatctgcaggactgatactgatacttggaaaaatgacaactatcaatggtactgatgtgagtatattctcctctaaacttagatttactgtaacattttctgtaatttagactgattttgtacaaaaacacatgatcaactaagaatcttgcgtggaatgatgagcaaactcgtttctaccttgaactaagaattgaggagaagcttaaaggaaatattaggaatcagaatgtcaatgatgctgggagacagactattatagatagattttatgaggttgatggtcgagtccaaggtagaatgctttgatattttacgcatgcaccagtcaacatttaggagtttatgcaagattctttcagaacaatacaagttagaggagtcctgcaatatctatcttgaagagagcgttgcaatgttcatagagatggttgcacaagatttaactgtacgggtcatagctgagagatatcagcattcacttgagacagtgaaaaggaagctggatgaagtattaagtgctcttttgaaactcgcagcagacatagtgaaacctacaagagatgattcacaggtataagtccctttctagtaaatgataaacgctatatgccttattttatagattgcattggtgcccttgatggtacacatgtgtctgtgcgtcctccatcaggagatgtggagcgatatagaggtaggaaatctgaagctacaatgaacattctagctctgtgtaatttcagtatgaaattcacttatgcatatgtaggagtacccggaagagcgcatgacactaaagtactaacctattgtgctacacacgaagcttcatttcctcacccacctgctggaaaatattacttagtagattcaggatatcctactagaagtggctacttaggtcctcaccgtaggactagataccatttagaactgtttaatagaggaggtcctccgacaaacagcagagaattgtttaatcgtagacattctagtttgagatctgtaatcgaaagaacatttggtgtgtggaaagctaaatggagaatacttgataggaagcacctaaagtatgaagtgaagaagtggattaagattgtgacatcaacgatggctttacataattatatacgagattcacaacaagaagatagtgattttaggcattgggaaatagttgaatcatatgagcagcatggtgatgaaaatgatgggcatgttccatatgtgcctactggtgacagagtaatggagaatatacgagattccatcactacagagatggccaaaggaacaagactcccatattaacaggttccatctctctgtcttatgctattgactgtctctgtcttatgctattgtctgtttctgtcttggttttaaattttgtgactaatagtgacagctgaatggtcacgtcactacataagttggttgattacacaaggcttggtttatttgtctctaaagtttctggattcaacttctgaacaaggtagtagtccacaagaaggatctttcttacgtgagttttttgttcctcttctctctgtctcttttctgatttcagtatcccaagtgtgatcttattttcttgccctctgttatataattggtgttattgattgattcttcatttatttatcgatgaagggttggttttcatttgtgttgaattggatctttgtttgaggcttctttttattgttcggatgattatgatttggtcatttactggaaattgagaatttttcgattcagttccatagagtaatggtatagactatagagtaaaggaaatcgaagaagtttgctttgtttaatggaaactgttggggaaaggatcattgtcctatctcatattcgattcctttggttttgtatttggttctcatttaattcatataggactgatattgataaagattagtctgaggctttgagctagtgcatttgtttgattgatgaatgaaactgtcatgttgaatttgttggtatgatattaatttgtatgtgcaggtcccaaaccggaagctgttgaagctgaataatgttgtgtgcctcattgatctcttgatgtaagaagctgaataatattgtgtgcagattggaccaaactctctttttcaaactctactttgattaatatgagaatgtagctatttattatttgttacttaacagaggacattttagtcatttacatatatatgagaatgtgaatgatccatccaaatgatcaaacaaacaaagctccatctaaatgaatcatttagatgaactagcaaataatcaaacaaacatcattaagatgaatcatcccaatggattatttggatggatcatttggatgctaattccaaatgatcaaacaaacagggccttagtttttaaaatcttcttattctatgttccttaggtacacaatccaaacgggtaggaagcttgctaatctcacgcaagactagaacccagatgatttgtaagttttaatatttaaattaaaggaaaaataattattaaaaaatctttcggatgaacagttttttttttttgaagttattattttgccaattacattaatagtcttagattagataaaggccatttaattataaaataaagaacgatttactatcttttctttatctttaatctctcgtaatgcagatgttgaggcggattatttagcacgaaaaattcgtgcagaatcgctacacattacttatgtaaacaattttccacaattttggctcgttagaatcctaaataatatctgatgacaaaaaaaacatatgatttacaatctcatccttgatcttaacactgtactacttgattttggtgtgaatgaggaaagcatatggtataaaggaacaaagaagttcacacttattgtaacgccctaaacattcaaaagaaattttgatgcattactataacaaaaatactaaaaaattttaaaatatacaaagttcaaatctcgtataaactccaaatctcaaaaacaaaataaattaaactttagaaaatctaccaagtctcgctatacgaataacaaactctaaacttcagctgcataccgctcctcgtcaatgtcctctgcacgaaatcagaacttatgtgagcaaaaaatcgcccagtgagattacaaacccaaagaacaagtaccaacacggtctgatcccgcacagattaatgctcacgtgttagtactaacaaacatagtttcaattcaattaattttaagtaaagtaaaacacatcagaacttatgctagcaaaatacataacttaatcatcagaacagaataatatcgtcagacagagtaataacatcagaaccgaacgaccaagtatccagcaatgcacgttggaatggtacaaccctagcattggtcgacccaaaccatatactaacataatatatacataatatactctataaggatgttggcccctaacgagatggtaaggaagtacggttcacggcattaaccgacctcaataccactaacagactaacagaatacagaatacatctgttggcgatgccggccgccacagattgccctatagatctagctaagtcaaagtgccatgctgataccagtcttaacagaataacatatcttattaacaaaatcatatctatattaattatcgaatcaaacaaataaattttcggaaattaacattcaaataatttaattaagtgtttaaactcacatctaacatattattctaatgtaccagttttaacagaatatcatattttatttttaaacaaaataacatatcttattaccaagaatcatattcatattagtttatctagataaccaaatcaatctttacaacttatcatgcaactagtttaattaattaattttctcacttttaaaatattatacaattgtacaatatctaaaagggagttagaactcacctgacaaagatattcagatcgaacgagtgatcaacagtaattttggacacattccaaaccactaaacaatttatctaaattcaaccgttaattttaagtgaaatcaagaacaggtatctgatttgccaaaactggtttaaaaagagccgaaccggtcagaattgctatgggtttaaaatcaaaactcaaatgaattccaaaatagatttcaaacgagtattttccatagacataaattctataaccggtttcaaaaccttaagaaccggcttaaataaatccccatttgactataaatcaacaaaatcaaaatatttaccaatcagattccgatcgtttccgacttccgtttggtgaattctcagcggcgttagattcatattgaaaagagctttctaacaaggtatagatcaagttctaattctttctgaaacgaaatccaccattaaagagcttgaagctctcttccattgagaaaatttgaataaggaagaagatgaggcttaccaaactcttgtaccagagctgaatacaactcagaactaaagctctaatatggaaaagcacgatcaacctaactcaccacaaaatctgatcacaagttgcccaaaaatattcaaaccgaagttgatgaagaagggtcttgaaatctcactaaaacctccaattgactacgtaatcggcttctaaatcgttaggcttgaaaacacatatatacgacatattagggttgagatacggaggtttgagttgtcaaaaactatcctttgatttcggaaagatgaactcgagttgccctcatttttttgttttttgcagtttagtccctttacctttctttatttagagattttgccttggacttttaaattaatcagaaatctccctgaagtcattcaatttttattcaatttaacccaaaatataactttttctcctttttcaaatttggggtgttacaattatattgtaccatatatatatggagattaaatagtgaagagaagatgatccaacatcaaaaactaaatgatcttttaggacaaactagagagaacatgatccaacaagttacaagttctcttgattatcaacatcatctgttagttgtttggttctttcaaggacacaactgttaatcatatatatgaaagttggcttactctctccatatgattgacacatcatcactttaacatttgtcatgtatctattaaataattaatgtaagctcttcaacttctaatttataggttaataatatatttattattttattttacatattattttattttacaaatttaattgtactattactaaatttattttaatattatatgattttcaataaaaccattttaatagttttctcatactcgaagatattttttgtaatctaaactcaaagtatgaaatgtataatagtcgtagattagttaatgaattgagtaggttataatcttaaattgatatttatataataaatcaccgagggtgaagaatacttaaagagcttcttcatcatcaaattcttaggtttcaagaagtccaacactaccctctgttaattagtttaagacgaacgttatttatgaattatgtgtatgatgcattgttgagaatgttgttagaaaaaaatattttaatactaaaaataactacttatttcatgaatgaataattagatgacatgtgttattctacattaattaaataaaaagattaccaatttttgttgtgttaaatcctccattaatctcacttttaaataattatttaaaaacattcaataaataaaaaatcataataatgtatcaagcactactttcattctactctacttattttatgaataatctttaatccataatggctataaatttacttgtgttgtagtttagatgtttgctacctaacctcatattaatttattaattttactcgaatattttcttattattatgttttgtgatgatgatctaccatatgattttttctttttatttttgtacgttcttataacttggtaacattgacatacaattttttcacgtaagggtcattccagacgttagacatacaaaaaaaacttacgagactctacatggctgtatacaagggaagagatctaaagtattgacttaaatttctagcatatcaggatgtgattggtgtaataaatgacgagagaatatacaaaataaagaattgtttgttatcattaagttagacaagttttaaatacataaataatataactacatacatttatcaatatatcatatattattgttgtatgtgttcatgatagtgaaatattaggataatagttatataaatattcatattataatagaattaatatttcgagttatacataaatttaattataaaaaatataattatgtaaaagatatgaatttatcaaaataaacatcaaaatcaacaaaaaaccataatcatatttttacgacaattttaaaaacaaaaacgcgggtgttcatttagtgtatttaatatttatttatgttaacgatagtttgtatttccaaaattttatatacatatgtaatattgaataacaataaatttattgagaaaccatttatattttgtaaattcgtcaatgtgcaacgtaatttcttctcctacttattgacaacaagtattattatatttctccaattttgattaatgtttttattttaactaaccactttctaaatctttgctctcaacttgtaactacaattttaatttaatttaaccagtaaccacactaacgttttaaaaaaaacaaaatatatgaaattatttttaatacgggtcaatactagttctttatacgtctacctcctttttccatttcttaattattcttttacataatcatactgtataataataatatatttatttacataacaacttataacaaaaaaaatacatttaacttgtggtacactaacatcattgcaaatagcttactccatttatactatgatcctcgtattgttgatcacatcgtattgttttaacttttaacatatttgcaaaataaaatttcagaaaaaaagataagaaataaaatactcattccccaaatctttctccaaactagtcaattttcctctttgggaccataattaatctactctttaaatttagacccaacatttttattaattaaaaaacccaaacctgtaactgtctcttagctagtggaacaaaatgagttcaatatcatcatcttcttcatcttccccaatcatttgactcacaaattcactttccactacttcgtcaaagttccaagatgccaaactcaacgacggaggactccgtcgccgttccactactcccctccctccgccgcgctactaactctacttctcaagtagcaatcgtcggtgccaacgtctgtccaatagaaagtctcgattacgagtacgtaaactctcaccgttgcttctccttccttcaattatcttcttcttaactttaatttcgttgtttactctttcgattcagaatcgcggagaatgatttcttcaagcaggattggagaggtcgtagtaaggtagagattttccaatacgtgtttatgaagtggctgctttgtttttgtatcggcattattgttagtctcatcggattcgctaataacctcgccgttgagaatctcgccggtgttaagtttgttgttacttctaacatgatgatagccggaaggtgagtctttcgcatttttacgattttcttaccttgtaatgttgatgattggattttgaatagagtgttgatattgtttctcaggtttgctatgggttttgttgttttctctgttacaaatttgattcttactctctttgcgtcggtgattaccgcttttgttgctcctgctgcggcaggttccggtataccggaagttaaggcttatttgaatggtgttgatgctccagagatattctcacttcgcactttgatcattaaggtaacgattttcgaggatttaggagcgatagagctcggaaattacgcaagtttatgttacaaatttgtatttgatttctctttgattggggtacagatcattgggaacatatctgcagtatcagcgtctcttctcattggaaaggcagggcctatggtgcatactggtgcttgtgttgcatctatacttggtcagggtggctccaaaagatatagattgacctggagatggctcagatttttcaaaaatgatagagacagaagagatcttgtaacttgtggggcagctgctggtatcgctgcttcgtttcgtgctccggttggtggtgtcctgtttgcgcttgaggaaatgtcatcttggtatgttaagttattctcttcaactcaaaagatatcttttttagttcattagttaccggtcactatatctgttcttatttagttcattgtgaatgattcattgaagctagaatggggttccgttgtaggtggaggagtgcacttttatggagaatcttcttttcgacagctgttgtggcaatagttctcagagctctaatcgatgtgtgtttaagtggaaagtgtgggttatttggtaaaggaggcttaataatgtttgatgtctactcagaaaatgcgtcatatcatttaggggatgtacttcctgttcttcttcttggggttgttggtggtattttaggaagcttatacaacttcttactggataaggttctgcgagcttacaactacatatatgagtaagcttacaactacagacacatacacacaagtaaatgttttcttgatttctaacagttttttctgtccaggaaaggggttacttggaaaatcctcctcgcttgtgcgatatcgattttcacgtcctgccttcttttcggattaccatttcttgcatcatgccaaccttgtcctgtcgatgccttagaggagtgccctacaattggacggtctggaaactttaagaaataccaatgccctcctggtcactacaatgatctagctagccttattttcaacacaaatgatgatgccatcaaaaaccttttcagcaaaaacactgacttcgagtttcattatttttcggttctcgtattttttgtcacctgcttcttcctcagtatctttagctatggcattgttgctccagcagggctctttgtgccagttattgtaacaggagcatcgtatggacggtttgtagggatgctgcttggttcaaactcaaatcttaatcatggtctgtttgctgtgctcggtgctgcatcctttcttggcggaacaatgaggatgacagtttccacttgtgttattctccttgagctgaccaacaatctgctgctactacctatgatgatggtggtccttctgatttcaaaaacagttgctgatggtttcaatgctaacatctacaacctcatcatgaagttaaaaggatttccctacctctacagccatgcagagccttacatgaggcagcttctagttggtgatgtagtcaccggcccacttcaagtcttcaatggcattgagaaagtcgagactattgtacacgttctcaaaacgaccaatcacaatggcttccccgtggttgatgggccaccactagctgcagctcctgttctacacggtctaatcctccgggctcatattctgactctgttaaagaaacgagtattcatgcctagtccagtagcttgtgactccaataccctttcccaattcaaggcagaggagtttgctaagaagggttctgggaggagtgataagatagaagatgtggaattaagcgaggaagaattgaatatgtatttggatttgcacccattctctaatgcctctccgtacactgttgtggagacaatgtcacttgcaaaggcccttattctcttccgtgaggttggcataaggcacttactggttataccaaaaacctccaatgtaagtgattttggtttcttctttctccctggtccttattagattatggtaggcactagtacgtgtgatacttgatacctatagatgaataataagtaaaatggtgaacacagtagagtctcttgagttttgtatgtttgttaagggaatcaataacaaaactcgaaatctcgaaccaccaattagttctctatatatctggtagctctttggtttcttggttcatcagttatcgaatattaaattcgttgatttgcattgcagagacctccagtggtaggtatattgacacggcatgacttcatgccggaacatatactaggcctgcatccctccgtttctcggagcaagtggaaaaggcttcggattcggctgcctttcttctcatgaagtattaagctgcctaccaagtttcaggtatgacagttcagataaactctgtacagtatattaaaagcagccttgtggtgctatgtcgaactcttagatacagaaagatgtagagagatttataaatgttgtattgctcttattgcatccgctacagcttttgttggttcttttttatttgttgtatataggttcttctatctttcgaccttcttcaatttctcggtccgaggactaaatacaaatttagactcccttaatacaatttgcgtaacgcgtagggccacaaacatacttttaggaaaacctgcaagatctcaacgaacatgaattagctcctaccatacaaaactgaaacagaatcatagaacattttaggacagcatacacgaatataactggtgtataatataggcataagatgataaaactaaatgaatagtattagttctctacatttttacgccattctctatatacacactgattataagaagtgagttggctgctttaatgcttttaaacactaaaagttagatttacttttttttgctctttgtttttgatagaaatatataatgagaagttagatttactttattttattataatctactcatattctaccaattttactgaaacaaaatattttccaaccaaaaaaagttgaaaataacatctgagctgctttctcaataaacaaccaagatttacagaagaatcaattatggatttgctattttttggaatgacatttgtggattttgtccttttatgaatagtttgtggatttgccctttttcaggctacaaaaatatgatttaacatgcgttttattcgttatgtttgggtttagtcggttgtggttgttcttaggcttcagtattttgtataaattacgtatttttatcaaaagaaatcataaatacgtatatttttaaatattagaaaatagtatatccgtaagattttagtaaaaatggtaattttaaaagatttatttgaaaaatagcaaaatcaacaataatccctttacagaatggaaaaagtttaattccctgccagtatgtgtttccaaaactttatttacaacctcaaacattccttaaaaagatacgccaatagtaatttttctgattggaacaatagataatacatagatatttcttacctaacactagtatacaatgaattctcttcagtattactcgtggggtttaaattttccaaatgaagaaatcttcacgtgaatctattcggtcttttggtccccatcatttcgttttctcatgtcagtataatgtatttttaaatgtttgtgaaatagtcaagaatgatgttgtaattgatatatatactagtaggtgaatatctacaaaacacacggatttttattcttatactagtttcttttgcgactaagccaatttccttgtaccgttatattttcttgttaaagctacatctttgaaatagggctgattatgcttgctatgttttatatgaaaaaaaactcgtaattattttttgggatgttaaatattgaggaggtgcatgcatttgaggaaaagatccagcacaatttaaacatcaacctcttttgttcaaaatggtttcttgtattataactacccataaagatttaacaaaataactcattagaattttgtttttttattcgcagtttaaagttgagttttttttgtatgcaaaatcctaatatgttactttttccacgttgttcgattttgcaaccgtgtttcggatgcacgctttctgttttgatgtcatcacatttactttttaagtcttaaaatcaatacttttaaacatacaaaaatgatcaaatttagtgttctcttacatatgtaaccaaaaatgtgtcatcatttatatgagtgtggaagcagagccgtaccaacgttaactcttcaaatttaatattaaaattaaaaataaaatgctctaattaaaaaagaaataacgtcaacaaaaataaacatatcttcatataattttttctaaataaactataaaaaaaaaagtaaaaaaaaaataaaaacaaactagccaacaaaatatctatatatacattttcacaacacttttatgaaataaatcctcaaattataacttatttacaaagaatgtcattaatattaattattatcaattaattaaatctctaattactattatttctttatctaatatatgtctatcaattctaattacttaaaaaaaaagaaaaatcttaggatattattaatagtatactttattaaaagtaaatattgtagttattaaacgtttacaatatttataatatgtgaaatttataaaagttaaataaccatttcaaagaaaacttttaaattgatttgaattataatttttttaataaaagtattattaaaacaaaaacaaataaaaaaaatttaatttcaccgaacaggattagatgataggacgagtttaaaaatattataatatataaaatttataacaattaaataaccatttgaaagaaaacttttacattgatttgaattatatatcttttaaattaaaatattattaaaaaaaataacaaaataatgtttaatttcacttaacgagattagatggtcggacatgtttggatcgacagtattacaagacggtataccacgggcaaaatcctaaatataacaatcaaaatacaattatattatcttaaacaataaacaaaacaaacaatatgaacaaaacaaatgtaatttaaatttaaattatttagttataatctaaattttaatttaatgaactgtatgttattgctcctatatttttaaacagtaaatatctaacatagtaattgtatgttattgctcctatgacttaatgaactgtatgttatttctaatttcttttggaatagcttctcttagaactttatgttcaaaaaaatatcattaccaacaacatgtgaatgctttccatggttagaaaatcttcaagattggcataaaaagccatcaaactatcatcacttgttgattgcaattttctcaacaaaaaaaaaaaacttgtttgtatctttgaaattgctcaaatcttaatttagtagaaagcttgatccatgatttgaataaagtcgtcaatcctgaagctgtcctcgtatgataatgtcacacttctctcaacattctctgattttcaccataatgtagtttagtttttttttaggaaatagatgatcgatctccaaaaattctgcagttttttagcttatgcttttgctctcttaaaatcttactctatatttttaaaaataagaaaccaacctcgtgagttgagaaatagctacatcaatgctcatatcttctaaatgcaaatttttactcacgatgttaaagtatataagattataccaaataatcattgaaactagaaactcaaaacttccaattccatgtattttacttgttgcaagacattaagtatcgctcgactctttcggatcatcacaattttcagcaatatatactaacacattcatgattttaagaacttgaaatcgtattgttttaacactttcgacatatccctacttccaatatacatttcaaaatcatattgccttaaaagcttaagtggtatgtcatccacgtaatatgtaaatatttttcaccgtttatttgaagatgaaaaaaggtaataagtatgttgaataatctccaaaaataagattgcttttgaagaagttgttatatgtgacaacaacatggtgtatataaaaaaaaacaccctaaatttatctcaagaaactgtttttgtactcccttatgttttttttttcattataaaaccattatcataacctttgttccctcacatccttaatttttaagttaaaaacagtcaaaacatcatgaaagtcagggtaaaaaattatcatcggatatatcaactttcaagaacattaaaaaaaatatttgattgttgaagttgagttaaacatctacacactaagtgatgatagtgatgtgtccatgatagctgatatttggaatacagtagaaaatgacggagaagttctttgtaccttgagttttctgaacactaataacttttacctcatccgcttaccaaaaacagttaacttgttctgagttccttattagtaaatttatcctattttttatttctttctaataacatagagttagcaaaacttttaagcaaatattaattttgttctgaattctttattagtaaatttatcatattttttatttctttctaataacatagagttagcaaatgttttaagcaaatattaatttatttcatcggatgacacatcactgcataatattgaatttatttttctaattttgcctttacagccatatttgttacaagttttggttcactatattattatacttatataatctagcagaaaatatttaaaactaatcaattttgttgcgatgtcacattgataacagactagcagtaaacggagatgactcatgtcaatttatattttaaataccaaacagcaattatcaatttaaacgcatttattgtagtattataaatctttgtgtctaaatgacgtcaaaagataaaccaaatttgtatcaaacttctttgtcccacctcaccaaaaaaagaacacttctttgtcccgcagtatactgaagcaagtttactgctattttctaaaataatttaaatggttagtgttataggactatttaaattagcaaatattaaagagaaaattgtgtggggagtcaaaaatatatatgaattaaaataacgtgtttttgataaaaatcaatatggtccatatatttaggtcaatgaatatatttcaaaaccaaaatcagtcaattaaataacgtgtcattcaagaaaaaaattgatacctttttatttttaatttacagtttagaacattctaaattatcattcagaaactgtagttttagtaaaactgtatcatgttctagtatcaaggaagagacgagattcaaattctgaggggaatgtctgcgaaatagaactagtcaatttgctatcattttttatctgtagatattatgtatatgatgaactagaacacatgattagacgtaaaaaaaaaaaaagtacgtatctaatcccaaaaaatttacatatcaaaaaataataatccaatcgtcccttagtaatttaatttattacttttaccatttagcaaaagaacttttcaatttttttaatacgttaaaaaaagtattatttaaattatcagtttattatttttgttggtttaaagcatgcataaacttgagatttgctaatttaaatccttaattgtatgttgactttcaatttaatcataaattttcgttgactaagccaattgaggtactaatttttttttcgacgtcattaattaacttaaaaacgagagattacttcgaattctaaaaagaatagaaaatccgaaaaagaggagataatccaaagaaaaattgaaaaaaaatctaaaatcaattttggagatctaaagtttgttcgtggttaggagaatttttaacgatgtgttttaattagcttagtaaacgagaattcgtaattaaattaaaaattaacataaaattaaggatttcaatcaccaaattaaaagttaaaccaataaaaatgataatttggtgatttaaatactatatttcccaaaaaataaccccaatactagttagaaaatatatagcagtgatgcaaacgtacggcatgtaaagctttctactaaaaataatgtataaaaatatctaaattttagtaaacgtgtcgaaaaagaaaaagggttctcaaattaaacgcattatttgttaagattataaatgcatactataaacgaatacaaggaagaaaaaaaatacaacaagtctttgacaaaaaaataataatacaacaagttgcttggtgatgcaaaactcatttctcctcccactaatgatcgatgatagagacataacaaagaatctttcatgacttttcttctttttctcctcacttccaaaaattctctcttgtcttcctcttaagatgaaagaatcataaaaggaacccaaagaaaagcaaaaacataaccatggctgctccaagatcaagaagatgctctctttctctcttaactcttttctccatcactcttattcttatttctgtttcactctttgtctccacaaaaccagctaataagcctttcctcgattacagaaaccagttttctatttccatctctatctcttctcctcttgaacaaaacacaacaaacactagttttgtctcagcctctcctcctttgtcccctcttggtcagagcaacacaacaaacactattcttgcttcttcttcttcttcttcctctttttctgatcaccaaaaccaaaataagtctccaagtcctacaagtaaaaaaattgttatcagggtatgtaatcattctttctctctttgtttttttctttttcaagtctcacaaataaataattttgtattgatcaaactctttttctttctaatacttttctttgtcaaagtaaataataatctttacttttatttttactatgatcagaaaagaagtgggttagacaaaatagaatcagatttagcaaaagcaagagcagcaattaagaaggcagcttctacacaaaattatgtcagctctctctataaaaatccagccgcctttcatcagttgagttttgcaattcttcttcttcttctttttttaaccatttgaggtaaaaaaaaagatttcttcttttattaaacagtaatttaatactagtacagtatttgacagttcctagatttttagtcaaatatgatagcgctgacaatttttcacatggattttgctgttttttcaaactatttgacatcgatttcatcaaagaattcagcatttaattacggttacaataaagacaaattaaacaaatacgcaacgtacacatagagttttaacggctcctgtgagatgcctctttctaagcaaaagtttactcttctttttgtttgtttattttcatatccgagattttgcagtacataatattggaattgagcttttgaggtttcaattgaactaaaaagaagttttaatgtattcaactacttttctactaaaagagtttgtttattctcatggcttcttttttataacataattagtttaaaagctaagattaaaaaaggttttaatcattaactatgtgttggaaaacaaaattaaagaaagcttttgaactttttgctaatcatatttaatttatttttttaatcaaaattatcaaattaggattttttttaatagtccttcttctcctttttaattgattttttagaaaacaaaacacacagattaagaaaacatattaaaactgattataaatgtattaatttttaggatttacattttactataattttaaattaatgatatttaattatttgttttgaagtttaaaatttatcaataaataactaataaatagtaaatagtaaatctaaaaaatcaattgtttgaaacaaattgttttctaaaaaattaattaataaggaacagagagaatatacaaataaaatattgagatgtttcttttttgtttaaagtattgagatgtttgttcattagaatagaagactattcgattctttcaaaacaagtaaacaagtaggagatagaatgaatatttaaactccaatacgaacgtggcgtagctcacctcagtgatattattacttgctttgtaataaataaaacattgatgtcatactcgtgtatgcacaaaatatcaggagtcacacggagatgatgaatcgttttaaggtgtggacatacacagagggagaggtcccattgttccatgacggccctgtgaatgacatttacggcatagaaggacaattcatggacgaaatgtgcgtggacggaccgaagagtagaagccgttttcgggcagatcgacccgagaatgctcatgttttcttcataccatttagcgtcgccaaggtcatccacttcgtctacaagcccatcacctctgtcgaagggttttcgcgggctcgcctacaccgccttatagaggattatgttgatgtagttgctactaagcatccatattggaaccgaagccaaggaggcgaccatttcatggtatcatgccatgactgggtacgtatactaattttctttttttaattgatggctaagagtttgaatattaaacatctttaattaatatcgtagttatttttggttaattttttatttaattttttgtcgacaattttatcagattagcttatataagccaatgtcgggaaatattgtttacataagtaaaaatatgcggttaattatttttggttagtaaacaaatttggcttgaattttaaaccaaattttgtttggcttgaattttaaataagcaaagacctccttgatattacaaattgctaaaaacaaaagagatgtagtgagttgatgaggctaacactaaaatagactatagtctctacgggagtgtagtatattagtatatcacttgatttatcttattaagaaaaaagtattatgtattatatcgaataatcttgttagaaacataacaaaacaagaaacgatttttgagatttgaattagagaaataatttacgtattgaaattggcttaaacctatacaagttttatattattgttgttgattttacgtagttgcttgattctattaatttgattaatattatatcaagaaaattatcatctaaattcctgatttttttttaatgaatatgatttacatttgtgtgtgtataggcaccagacgtgattgatgggaatccaaagttgtttgaaaaattcattaggggactttgcaatgctaacacctcggaaggtttccgacctaacgtggacgtatccattccggagatctaccttcctaaaggtaaattgggtccgtcttttctcgggaaatcaccgcgagttcgatctatactcgcatttttcgctggaagaagtcacggtgaaatccgaaaaatcttatttcaacattggaaagaaatggacaatgaagtccaagtctatgatcgtcttccgccaggaaaagactatacaaaaactatgggaatgagtaagttttgtctgtgtccgagtggttgggaggtcgctagcccgagggaggtcgaggcgatatatgctggttgtgtaccagtgatcatatcggataattattcattaccattcagtgatgtgctgaattgggattccttctccatacaaatccctgtttctaggataaaagagatcaaaaccattctacaaagtgtctctctcgtaagatacttgaagatgtataagagagttttagaagtgaagcagcatttcgtgttgaatcgtccagctaaaccctacgatgtgatgcatatgatgcttcattcgatctggttaagacgacttaatcttaggcttggtacatagtatacaattttttgttatgttgcaaataaatattaagtgtctaagttcatatgagttactagctttgtattctttccataaatttgcatagttctctcttgtaaaaaaatatacaacaacaaacacaatatcaaagatttccttattaataagagaaacaaagcatttgttatttttgttaattagcatttgttattactgttaattaatacttgttgtttctttttttcttcttagttattgtaactccgactcattcgtcttgatctagacatttttgtagctcttttgaaagattgatgatcattctttacgtaaagatattcataacattttcttcctactgtaagaaacctaccatgtctctcttatttctattagcatttatgtgtgagtagtgatcatatatttgggtctatgtggttgaatgttgttctatttttgagattcttcgttagttcgttcataaattccatgattaatcctttaatatttagttaaatagacactaacatagcttgggagatactttagccatatgttactatgtttagtgtcttgcctacatatgaacagtttttttttttttgaacttcaaaaaacaaaccaagtctcttatcatcttcagacctcaagttgcaaaatagctctaaaatcaaacgattcatagccaaatgtctgagacaccttttcttttacaacgtttagataatgattgcagcggttttggtatataaaccaaaagaaaaacgtttaagctt

SEQ ID NO: 1475 - DNA, 116461 bp, Arabidopsis thaliana
gaattccaaaatagatttcaaacgagtattttccatagacataaattctataaccggtttcaaaaccttaagaaccggcttaaataaatccccatttgactataaatcaacaaaatcaaaatatttaccaatcagattccgatcgtttccgacttccgtttggtgaattctcagcggcgttagattcatattgaaaagagctttctaacaaggtatagatcaagttctaattctttctgaaacgaaatccaccattaaagagcttgaagctctcttccattgagaaaatttgaataaggaagaagatgaggcttaccaaactcttgtaccagagctgaatacaactcagaactaaagctctaatatggaaaagcacgatcaacctaactcaccacaaaatctgatcacaagttgcccaaaaatattcaaaccgaagttgatgaagaagggtcttgaaatctcactaaaacctccaattgactacgtaatcggcttctaaatcgttaggcttgaaaacacatatatacgacatattagggttgagatacggaggtttgagttgtcaaaaactatcctttgatttcggaaagatgaactcgagttgccctcatttttttgttttttgcagtttagtccctttacctttctttatttagagattttgccttggacttttaaattaatcagaaatctccctgaagtcattcaatttttattcaatttaacccaaaatataactttttctcctttttcaaatttggggtgttacaattatattgtaccatatatatatggagattaaatagtgaagagaagatgatccaacatcaaaaactaaatgatcttttaggacaaactagagagaacatgatccaacaagttacaagttctcttgattatcaacatcatctgttagttgtttggttctttcaaggacacaactgttaatcatatatatgaaagttggcttactctctccatatgattgacacatcatcactttaacatttgtcatgtatctattaaataattaatgtaagctcttcaacttctaatttataggttaataatatatttattattttattttacatattattttattttacaaatttaattgtactattactaaatttattttaatattatatgattttcaataaaaccattttaatagttttctcatactcgaagatattttttgtaatctaaactcaaagtatgaaatgtataatagtcgtagattagttaatgaattgagtaggttataatcttaaattgatatttatataataaatcaccgagggtgaagaatacttaaagagcttcttcatcatcaaattcttaggtttcaagaagtccaacactaccctctgttaattagtttaagacgaacgttatttatgaattatgtgtatgatgcattgttgagaatgttgttagaaaaaaatattttaatactaaaaataactacttatttcatgaatgaataattagatgacatgtgttattctacattaattaaataaaaagattaccaatttttgttgtgttaaatcctccattaatctcacttttaaataattatttaaaaacattcaataaataaaaaatcataataatgtatcaagcactactttcattctactctacttattttatgaataatctttaatccataatggctataaatttacttgtgttgtagtttagatgtttgctacctaacctcatattaatttattaattttactcgaatattttcttattattatgttttgtgatgatgatctaccatatgattttttctttttatttttgtacgttcttataacttggtaacattgacatacaattttttcacgtaagggtcattccagacgttagacatacaaaaaaaacttacgagactctacatggctgtatacaagggaagagatctaaagtattgacttaaatttctagcatatcaggatgtgattggtgtaataaatgacgagagaatatacaaaataaagaattgtttgttatcattaagttagacaagttttaaatacataaataatataactacatacatttatcaatatatcatatattattgttgtatgtgttcatgatagtgaaatattaggataatagttatataaatattcatattataatagaattaatatttcgagttatacataaatttaattataaaaaatataattatgtaaaagatatgaatttatcaaaataaacatcaaaatcaacaaaaaaccataatcatatttttacgacaattttaaaaacaaaaacgcgggtgttcatttagtgtatttaatatttatttatgttaacgatagtttgtatttccaaaattttatatacatatgtaatattgaataacaataaatttattgagaaaccatttatattttgtaaattcgtcaatgtgcaacgtaatttcttctcctacttattgacaacaagtattattatatttctccaattttgattaatgtttttattttaactaaccactttctaaatctttgctctcaacttgtaactacaattttaatttaatttaaccagtaaccacactaacgttttaaaaaaaacaaaatatatgaaattatttttaatacgggtcaatactagttctttatacgtctacctcctttttccatttcttaattattcttttacataatcatactgtataataataatatatttatttacataacaacttataacaaaaaaaatacatttaacttgtggtacactaacatcattgcaaatagcttactccatttatactatgatcctcgtattgttgatcacatcgtattgttttaacttttaacatatttgcaaaataaaatttcagaaaaaaagataagaaataaaatactcattccccaaatctttctccaaactagtcaattttcctctttgggaccataattaatctactctttaaatttagacccaacatttttattaattaaaaaacccaaacctgtaactgtctcttagctagtggaacaaaatgagttcaatatcatcatcttcttcatcttccccaatcatttgactcacaaattcactttccactacttcgtcaaagttccaagatgccaaactcaacgacggaggactccgtcgccgttccactactcccctccctccgccgcgctactaactctacttctcaagtagcaatcgtcggtgccaacgtctgtccaatagaaagtctcgattacgagtacgtaaactctcaccgttgcttctccttccttcaattatcttcttcttaactttaatttcgttgtttactctttcgattcagaatcgcggagaatgatttcttcaagcaggattggagaggtcgtagtaaggtagagattttccaatacgtgtttatgaagtggctgctttgtttttgtatcggcattattgttagtctcatcggattcgctaataacctcgccgttgagaatctcgccggtgttaagtttgttgttacttctaacatgatgatagccggaaggtgagtctttcgcatttttacgattttcttaccttgtaatgttgatgattggattttgaatagagtgttgatattgtttctcaggtttgctatgggttttgttgttttctctgttacaaatttgattcttactctctttgcgtcggtgattaccgcttttgttgctcctgctgcggcaggttccggtataccggaagttaaggcttatttgaatggtgttgatgctccagagatattctcacttcgcactttgatcattaaggtaacgattttcgaggatttaggagcgatagagctcggaaattacgcaagtttatgttacaaatttgtatttgatttctctttgattggggtacagatcattgggaacatatctgcagtatcagcgtctcttctcattggaaaggcagggcctatggtgcatactggtgcttgtgttgcatctatacttggtcagggtggctccaaaagatatagattgacctggagatggctcagatttttcaaaaatgatagagacagaagagatcttgtaacttgtggggcagctgctggtatcgctgcttcgtttcgtgctccggttggtggtgtcctgtttgcgcttgaggaaatgtcatcttggtatgttaagttattctcttcaactcaaaagatatcttttttagttcattagttaccggtcactatatctgttcttatttagttcattgtgaatgattcattgaagctagaatggggttccgttgtaggtggaggagtgcacttttatggagaatcttcttttcgacagctgttgtggcaatagttctcagagctctaatcgatgtgtgtttaagtggaaagtgtgggttatttggtaaaggaggcttaataatgtttgatgtctactcagaaaatgcgtcatatcatttaggggatgtacttcctgttcttcttcttggggttgttggtggtattttaggaagcttatacaacttcttactggataaggttctgcgagcttacaactacatatatgagtaagcttacaactacagacacatacacacaagtaaatgttttcttgatttctaacagttttttctgtccaggaaaggggttacttggaaaatcctcctcgcttgtgcgatatcgattttcacgtcctgccttcttttcggattaccatttcttgcatcatgccaaccttgtcctgtcgatgccttagaggagtgccctacaattggacggtctggaaactttaagaaataccaatgccctcctggtcactacaatgatctagctagccttattttcaacacaaatgatgatgccatcaaaaaccttttcagcaaaaacactgacttcgagtttcattatttttcggttctcgtattttttgtcacctgcttcttcctcagtatctttagctatggcattgttgctccagcagggctctttgtgccagttattgtaacaggagcatcgtatggacggtttgtagggatgctgcttggttcaaactcaaatcttaatcatggtctgtttgctgtgctcggtgctgcatcctttcttggcggaacaatgaggatgacagtttccacttgtgttattctccttgagctgaccaacaatctgctgctactacctatgatgatggtggtccttctgatttcaaaaacagttgctgatggtttcaatgctaacatctacaacctcatcatgaagttaaaaggatttccctacctctacagccatgcagagccttacatgaggcagcttctagttggtgatgtagtcaccggcccacttcaagtcttcaatggcattgagaaagtcgagactattgtacacgttctcaaaacgaccaatcacaatggcttccccgtggttgatgggccaccactagctgcagctcctgttctacacggtctaatcctccgggctcatattctgactctgttaaagaaacgagtattcatgcctagtccagtagcttgtgactccaataccctttcccaattcaaggcagaggagtttgctaagaagggttctgggaggagtgataagatagaagatgtggaattaagcgaggaagaattgaatatgtatttggatttgcacccattctctaatgcctctccgtacactgttgtggagacaatgtcacttgcaaaggcccttattctcttccgtgaggttggcataaggcacttactggttataccaaaaacctccaatgtaagtgattttggtttcttctttctccctggtccttattagattatggtaggcactagtacgtgtgatacttgatacctatagatgaataataagtaaaatggtgaacacagtagagtctcttgagttttgtatgtttgttaagggaatcaataacaaaactcgaaatctcgaaccaccaattagttctctatatatctggtagctctttggtttcttggttcatcagttatcgaatattaaattcgttgatttgcattgcagagacctccagtggtaggtatattgacacggcatgacttcatgccggaacatatactaggcctgcatccctccgtttctcggagcaagtggaaaaggcttcggattcggctgcctttcttctcatgaagtattaagctgcctaccaagtttcaggtatgacagttcagataaactctgtacagtatattaaaagcagccttgtggtgctatgtcgaactcttagatacagaaagatgtagagagatttataaatgttgtattgctcttattgcatccgctacagcttttgttggttcttttttatttgttgtatataggttcttctatctttcgaccttcttcaatttctcggtccgaggactaaatacaaatttagactcccttaatacaatttgcgtaacgcgtagggccacaaacatacttttaggaaaacctgcaagatctcaacgaacatgaattagctcctaccatacaaaactgaaacagaatcatagaacattttaggacagcatacacgaatataactggtgtataatataggcataagatgataaaactaaatgaatagtattagttctctacatttttacgccattctctatatacacactgattataagaagtgagttggctgctttaatgcttttaaacactaaaagttagatttacttttttttgctctttgtttttgatagaaatatataatgagaagttagatttactttattttattataatctactcatattctaccaattttactgaaacaaaatattttccaaccaaaaaaagttgaaaataacatctgagctgctttctcaataaacaaccaagatttacagaagaatcaattatggatttgctattttttggaatgacatttgtggattttgtccttttatgaatagtttgtggatttgccctttttcaggctacaaaaatatgatttaacatgcgttttattcgttatgtttgggtttagtcggttgtggttgttcttaggcttcagtattttgtataaattacgtatttttatcaaaagaaatcataaatacgtatatttttaaatattagaaaatagtatatccgtaagattttagtaaaaatggtaattttaaaagatttatttgaaaaatagcaaaatcaacaataatccctttacagaatggaaaaagtttaattccctgccagtatgtgtttccaaaactttatttacaacctcaaacattccttaaaaagatacgccaatagtaatttttctgattggaacaatagataatacatagatatttcttacctaacactagtatacaatgaattctcttcagtattactcgtggggtttaaattttccaaatgaagaaatcttcacgtgaatctattcggtcttttggtccccatcatttcgttttctcatgtcagtataatgtatttttaaatgtttgtgaaatagtcaagaatgatgttgtaattgatatatatactagtaggtgaatatctacaaaacacacggatttttattcttatactagtttcttttgcgactaagccaatttccttgtaccgttatattttcttgttaaagctacatctttgaaatagggctgattatgcttgctatgttttatatgaaaaaaaactcgtaattattttttgggatgttaaatattgaggaggtgcatgcatttgaggaaaagatccagcacaatttaaacatcaacctcttttgttcaaaatggtttcttgtattataactacccataaagatttaacaaaataactcattagaattttgtttttttattcgcagtttaaagttgagttttttttgtatgcaaaatcctaatatgttactttttccacgttgttcgattttgcaaccgtgtttcggatgcacgctttctgttttgatgtcatcacatttactttttaagtcttaaaatcaatacttttaaacatacaaaaatgatcaaatttagtgttctcttacatatgtaaccaaaaatgtgtcatcatttatatgagtgtggaagcagagccgtaccaacgttaactcttcaaatttaatattaaaattaaaaataaaatgctctaattaaaaaagaaataacgtcaacaaaaataaacatatcttcatataattttttctaaataaactataaaaaaaaaagtaaaaaaaaaataaaaacaaactagccaacaaaatatctatatatacattttcacaacacttttatgaaataaatcctcaaattataacttatttacaaagaatgtcattaatattaattattatcaattaattaaatctctaattactattatttctttatctaatatatgtctatcaattctaattacttaaaaaaaaagaaaaatcttaggatattattaatagtatactttattaaaagtaaatattgtagttattaaacgtttacaatatttataatatgtgaaatttataaaagttaaataaccatttcaaagaaaacttttaaattgatttgaattataatttttttaataaaagtattattaaaacaaaaacaaataaaaaaaatttaatttcaccgaacaggattagatgataggacgagtttaaaaatattataatatataaaatttataacaattaaataaccatttgaaagaaaacttttacattgatttgaattatatatcttttaaattaaaatattattaaaaaaaataacaaaataatgtttaatttcacttaacgagattagatggtcggacatgtttggatcgacagtattacaagacggtataccacgggcaaaatcctaaatataacaatcaaaatacaattatattatcttaaacaataaacaaaacaaacaatatgaacaaaacaaatgtaatttaaatttaaattatttagttataatctaaattttaatttaatgaactgtatgttattgctcctatatttttaaacagtaaatatctaacatagtaattgtatgttattgctcctatgacttaatgaactgtatgttatttctaatttcttttggaatagcttctcttagaactttatgttcaaaaaaatatcattaccaacaacatgtgaatgctttccatggttagaaaatcttcaagattggcataaaaagccatcaaactatcatcacttgttgattgcaattttctcaacaaaaaaaaaaaacttgtttgtatctttgaaattgctcaaatcttaatttagtagaaagcttgatccatgatttgaataaagtcgtcaatcctgaagctgtcctcgtatgataatgtcacacttctctcaacattctctgattttcaccataatgtagtttagtttttttttaggaaatagatgatcgatctccaaaaattctgcagttttttagcttatgcttttgctctcttaaaatcttactctatatttttaaaaataagaaaccaacctcgtgagttgagaaatagctacatcaatgctcatatcttctaaatgcaaatttttactcacgatgttaaagtatataagattataccaaataatcattgaaactagaaactcaaaacttccaattccatgtattttacttgttgcaagacattaagtatcgctcgactctttcggatcatcacaattttcagcaatatatactaacacattcatgattttaagaacttgaaatcgtattgttttaacactttcgacatatccctacttccaatatacatttcaaaatcatattgccttaaaagcttaagtggtatgtcatccacgtaatatgtaaatatttttcaccgtttatttgaagatgaaaaaaggtaataagtatgttgaataatctccaaaaataagattgcttttgaagaagttgttatatgtgacaacaacatggtgtatataaaaaaaaacaccctaaatttatctcaagaaactgtttttgtactcccttatgttttttttttcattataaaaccattatcataacctttgttccctcacatccttaatttttaagttaaaaacagtcaaaacatcatgaaagtcagggtaaaaaattatcatcggatatatcaactttcaagaacattaaaaaaaatatttgattgttgaagttgagttaaacatctacacactaagtgatgatagtgatgtgtccatgatagctgatatttggaatacagtagaaaatgacggagaagttctttgtaccttgagttttctgaacactaataacttttacctcatccgcttaccaaaaacagttaacttgttctgagttccttattagtaaatttatcctattttttatttctttctaataacatagagttagcaaaacttttaagcaaatattaattttgttctgaattctttattagtaaatttatcatattttttatttctttctaataacatagagttagcaaatgttttaagcaaatattaatttatttcatcggatgacacatcactgcataatattgaatttatttttctaattttgcctttacagccatatttgttacaagttttggttcactatattattatacttatataatctagcagaaaatatttaaaactaatcaattttgttgcgatgtcacattgataacagactagcagtaaacggagatgactcatgtcaatttatattttaaataccaaacagcaattatcaatttaaacgcatttattgtagtattataaatctttgtgtctaaatgacgtcaaaagataaaccaaatttgtatcaaacttctttgtcccacctcaccaaaaaaagaacacttctttgtcccgcagtatactgaagcaagtttactgctattttctaaaataatttaaatggttagtgttataggactatttaaattagcaaatattaaagagaaaattgtgtggggagtcaaaaatatatatgaattaaaataacgtgtttttgataaaaatcaatatggtccatatatttaggtcaatgaatatatttcaaaaccaaaatcagtcaattaaataacgtgtcattcaagaaaaaaattgatacctttttatttttaatttacagtttagaacattctaaattatcattcagaaactgtagttttagtaaaactgtatcatgttctagtatcaaggaagagacgagattcaaattctgaggggaatgtctgcgaaatagaactagtcaatttgctatcattttttatctgtagatattatgtatatgatgaactagaacacatgattagacgtaaaaaaaaaaaaagtacgtatctaatcccaaaaaatttacatatcaaaaaataataatccaatcgtcccttagtaatttaatttattacttttaccatttagcaaaagaacttttcaatttttttaatacgttaaaaaaagtattatttaaattatcagtttattatttttgttggtttaaagcatgcataaacttgagatttgctaatttaaatccttaattgtatgttgactttcaatttaatcataaattttcgttgactaagccaattgaggtactaatttttttttcgacgtcattaattaacttaaaaacgagagattacttcgaattctaaaaagaatagaaaatccgaaaaagaggagataatccaaagaaaaattgaaaaaaaatctaaaatcaattttggagatctaaagtttgttcgtggttaggagaatttttaacgatgtgttttaattagcttagtaaacgagaattcgtaattaaattaaaaattaacataaaattaaggatttcaatcaccaaattaaaagttaaaccaataaaaatgataatttggtgatttaaatactatatttcccaaaaaataaccccaatactagttagaaaatatatagcagtgatgcaaacgtacggcatgtaaagctttctactaaaaataatgtataaaaatatctaaattttagtaaacgtgtcgaaaaagaaaaagggttctcaaattaaacgcattatttgttaagattataaatgcatactataaacgaatacaaggaagaaaaaaaatacaacaagtctttgacaaaaaaataataatacaacaagttgcttggtgatgcaaaactcatttctcctcccactaatgatcgatgatagagacataacaaagaatctttcatgacttttcttctttttctcctcacttccaaaaattctctcttgtcttcctcttaagatgaaagaatcataaaaggaacccaaagaaaagcaaaaacataaccatggctgctccaagatcaagaagatgctctctttctctcttaactcttttctccatcactcttattcttatttctgtttcactctttgtctccacaaaaccagctaataagcctttcctcgattacagaaaccagttttctatttccatctctatctcttctcctcttgaacaaaacacaacaaacactagttttgtctcagcctctcctcctttgtcccctcttggtcagagcaacacaacaaacactattcttgcttcttcttcttcttcttcctctttttctgatcaccaaaaccaaaataagtctccaagtcctacaagtaaaaaaattgttatcagggtatgtaatcattctttctctctttgtttttttctttttcaagtctcacaaataaataattttgtattgatcaaactctttttctttctaatacttttctttgtcaaagtaaataataatctttacttttatttttactatgatcagaaaagaagtgggttagacaaaatagaatcagatttagcaaaagcaagagcagcaattaagaaggcagcttctacacaaaattatgtcagctctctctataaaaatccagccgcctttcatcagttgagttttgcaattcttcttcttcttctttttttaaccatttgaggtaaaaaaaaagatttcttcttttattaaacagtaatttaatactagtacagtatttgacagttcctagatttttagtcaaatatgatagcgctgacaatttttcacatggattttgctgttttttcaaactatttgacatcgatttcatcaaagaattcagcatttaattacggttacaataaagacaaattaaacaaatacgcaacgtacacatagagttttaacggctcctgtgagatgcctctttctaagcaaaagtttactcttctttttgtttgtttattttcatatccgagattttgcagtacataatattggaattgagcttttgaggtttcaattgaactaaaaagaagttttaatgtattcaactacttttctactaaaagagtttgtttattctcatggcttcttttttataacataattagtttaaaagctaagattaaaaaaggttttaatcattaactatgtgttggaaaacaaaattaaagaaagcttttgaactttttgctaatcatatttaatttatttttttaatcaaaattatcaaattaggattttttttaatagtccttcttctcctttttaattgattttttagaaaacaaaacacacagattaagaaaacatattaaaactgattataaatgtattaatttttaggatttacattttactataattttaaattaatgatatttaattatttgttttgaagtttaaaatttatcaataaataactaataaatagtaaatagtaaatctaaaaaatcaattgtttgaaacaaattgttttctaaaaaattaattaataaggaacagagagaatatacaaataaaatattgagatgtttcttttttgtttaaagtattgagatgtttgttcattagaatagaagactattcgattctttcaaaacaagtaaacaagtaggagatagaatgaatatttaaactccaatacgaacgtggcgtagctcacctcagtgatattattacttgctttgtaataaataaaacattgatgtcatactcgtgtatgcacaaaatatcaggagtcacacggagatgatgaatcgttttaaggtgtggacatacacagagggagaggtcccattgttccatgacggccctgtgaatgacatttacggcatagaaggacaattcatggacgaaatgtgcgtggacggaccgaagagtagaagccgttttcgggcagatcgacccgagaatgctcatgttttcttcataccatttagcgtcgccaaggtcatccacttcgtctacaagcccatcacctctgtcgaagggttttcgcgggctcgcctacaccgccttatagaggattatgttgatgtagttgctactaagcatccatattggaaccgaagccaaggaggcgaccatttcatggtatcatgccatgactgggtacgtatactaattttctttttttaattgatggctaagagtttgaatattaaacatctttaattaatatcgtagttatttttggttaattttttatttaattttttgtcgacaattttatcagattagcttatataagccaatgtcgggaaatattgtttacataagtaaaaatatgcggttaattatttttggttagtaaacaaatttggcttgaattttaaaccaaattttgtttggcttgaattttaaataagcaaagacctccttgatattacaaattgctaaaaacaaaagagatgtagtgagttgatgaggctaacactaaaatagactatagtctctacgggagtgtagtatattagtatatcacttgatttatcttattaagaaaaaagtattatgtattatatcgaataatcttgttagaaacataacaaaacaagaaacgatttttgagatttgaattagagaaataatttacgtattgaaattggcttaaacctatacaagttttatattattgttgttgattttacgtagttgcttgattctattaatttgattaatattatatcaagaaaattatcatctaaattcctgatttttttttaatgaatatgatttacatttgtgtgtgtataggcaccagacgtgattgatgggaatccaaagttgtttgaaaaattcattaggggactttgcaatgctaacacctcggaaggtttccgacctaacgtggacgtatccattccggagatctaccttcctaaaggtaaattgggtccgtcttttctcgggaaatcaccgcgagttcgatctatactcgcatttttcgctggaagaagtcacggtgaaatccgaaaaatcttatttcaacattggaaagaaatggacaatgaagtccaagtctatgatcgtcttccgccaggaaaagactatacaaaaactatgggaatgagtaagttttgtctgtgtccgagtggttgggaggtcgctagcccgagggaggtcgaggcgatatatgctggttgtgtaccagtgatcatatcggataattattcattaccattcagtgatgtgctgaattgggattccttctccatacaaatccctgtttctaggataaaagagatcaaaaccattctacaaagtgtctctctcgtaagatacttgaagatgtataagagagttttagaagtgaagcagcatttcgtgttgaatcgtccagctaaaccctacgatgtgatgcatatgatgcttcattcgatctggttaagacgacttaatcttaggcttggtacatagtatacaattttttgttatgttgcaaataaatattaagtgtctaagttcatatgagttactagctttgtattctttccataaatttgcatagttctctcttgtaaaaaaatatacaacaacaaacacaatatcaaagatttccttattaataagagaaacaaagcatttgttatttttgttaattagcatttgttattactgttaattaatacttgttgtttctttttttcttcttagttattgtaactccgactcattcgtcttgatctagacatttttgtagctcttttgaaagattgatgatcattctttacgtaaagatattcataacattttcttcctactgtaagaaacctaccatgtctctcttatttctattagcatttatgtgtgagtagtgatcatatatttgggtctatgtggttgaatgttgttctatttttgagattcttcgttagttcgttcataaattccatgattaatcctttaatatttagttaaatagacactaacatagcttgggagatactttagccatatgttactatgtttagtgtcttgcctacatatgaacagtttttttttttttgaacttcaaaaaacaaaccaagtctcttatcatcttcagacctcaagttgcaaaatagctctaaaatcaaacgattcatagccaaatgtctgagacaccttttcttttacaacgtttagataatgattgcagcggttttggtatataaaccaaaagaaaaacgtttaagcttcttaaagtgtttctctgtttactttcatatccttttatcaattttcattatttcttagcaacccgtttctgcactttcctcaacttaccaacttttacagcttcctgtaaaatccaaaattaaagttataaccaaatatgtgaaaatggctggtcataaattagaggttgcagaagaagaagtttacttgtatattccctatgtcacgtaatggttgtttatttgcgcctttgtcgtcatggctaattccagcaggcttcttaacatctattggttccattggtttgtcgggtttcgcactttcgtctctgttgctacatttggaagctaagcagccacaagagtccccacatccacttccatttgccttgcatttgcaacttttggtcttgcacaaagattttttagtgcaagagcaacacacttctgctttgctctgttcctttttgcaaagtgtttcctcagaagtttccggttgaaatggctccgagtttgattcatcgtcgatattcttgctggtgatagagcgttccactggttcgctctgatcacaacaattggaatcgaaaaatcagacaacaaaccaggagaaaaattggcatttgttattaaggtataaaattaacctgaactttatcagtttcactgaattgtgatttggtcatttccatctggctgacaagagtactcagtttgttaaattcctctttgagttcctttagttctgagtccattggagtgtggttgatttggttgtcacaagacgcagaactaaataagagaagcaaagataaccaatcaccaaagagaacacaacttgaggctacaacaaaagtttagctacgatcaaacttaccatgagctttgctctccctcaaattctgccttcaacaaacctgcctctaagctgaaccttttgatctcttcagccattctgataaaaatagtaaagaatacataatttcatgctactgaagtaatagagtagcaatagcaaaaagaaagggatataaaatcccacagcttttcttttgaaagcttactctttcatttggcgttcgtaatcagaatgaattttattcagtttcattagtaggcctgattcattgctagactcctgcacaaccagaataagaaaccatttggagttccaaaatgtagaaatcaatacaacaccacgtatatcatccaataacaaaaatctgaatctttgtcacgagtgtaacatatactaaagatcctaaatagaggttccaaaaaattagtgctgttgagagcttatgtaacacttaaccaattgcttaaactctcgttgaaaataagatgttacattgatgcttaggctcaggtatccatacctgaatctcggagcttgttccttttgatgggcctggaaaatacaaagaagacacttacacaatttagcaaaagaaacaaggaaaagaaaggaacggataccagctatctgttatgttacctttctttttgttggaagaaatctttttagattgaagcagcatttttagacgcttcagggctgtcaaagcttgtgtattcttcagctgcaaaatctgagtaaaagaatatagacattaacaagtcacatggagtcagtagtaaaccacggttgctgaaatatacatatagcatagtacaatcagcagaaaatataccagcttctggcgattgttcagagctgacaggacatgtttctcaaactcacttttccttagctcttttttgagctgttacaatagaagcactatataattaaaagcctgaggtatcatatatgagggaaaacatgatcaaactaagagagcactgaacaaggcaagcacaattggctaacaatctcatcaagaaagaatgtatccaaactgatcttggaatacaattctcaaaatcaaactaccataactagaacccctgttgtgtactgtatatatatggaaaaccatatgtgcaacaaacaatttgaacaaaaaacatggggattttgagaacgtttatcaatcatacataagtataaatcaagtatggcatgtaaccagattatcaactatcatctatgtccatcagaacttgactgcattatgatgtaacccgaagtgggaatctacaacttgatgatttgacattcactcataaaccaaagaaaaaatgtatagatactagacctgctactctcgttacctgaagaacttccttttctagtgaagctttcaatagtctgaactgcatagagtctagcttgatcttgcaatgcaacttaacctgaagaatatacacaactcacaaaactaaaaacccaaaacaaactgctgcattttccattgatcataaacattatttacaacaatatacttcaccttttgcgccttcaatttctgaacttcaccatcaaattgcttaacagaactctcagttttatacttctttgtggagcacatagacttactccttgaactcataccctatacaagtatcaaggtcaaaaaaatatgcgtagtatagcataaatgtctctttttaaaaattgaaacctgagaaacaaaataatccacctcctctttgttagcaatagacttttgagaaaactttctgcttgactgtaacgtaccaaccgatgagcttatcgaaacatcagccaattttgaccttagctcttccacatcactctgccgaaatccgaaacaatcatttcaacattacacaatacacaataagttctatagaatgattctatacatttatattaatgcgaattgatcaatttcacagttctctaagatatttttctgcaaattggaaactgaagcgacgaatatcattcataaattgagatcttaagcgagatattttcgagagattatcttccacaagtacgaaatcgaagcaaaagaagcgattctaaatttgataatcggagaaaaaattcaaaatgaaaaatggggggaaaccttgagagcttcgttcacggactccagatccagaatcttcttctcgtagagtttctcagcatcgtctccgagagatgaatcctttgatcggagatttggcttcttcgtcatcttcggcgaagagtttgtactttctcgatgcgagtgtgagagacaacaacgctccttcttctctctctctttcctaattgatgaaaaggtgcggagagaagtatttgaatttacaattagttttagtttcattatgggcctaaaataacgaaagcccatcttattttttcaacctaaggcccacaaccaaaataattttatcatttttaaacaaagacccaacaggaaagaaggtttaaggtgttgttcctttatggacatgtcctagggttccacacttttgggagggtattcaatgattgaattaaaagaatttagtttaacagaatttagttggattctaaaaacacgtcgagataagtatgagaatttgtttttttttgtttgtttgtattggttttgttaaaaaggcataaaaaataagaatatgttttggataagactaataaaataatactgttgatttttttttttttttttttaaattatattaagactcctgtgacattttggagatgagacttgcttgtaacgccattgttttcatcgtaagtgttgttctcttcggatgtcacgtagaatctccatgagatacacagttttcatcagctatgtgagcaaaaagagaaaaggaaatatttgttttgtgtcttgatgggagaagaactaattagagttttagagtaatattgaactctgtcatccaaaggtgtaacaacaaaacatctttcgcccggcaagcatcatctgaacagggttttttatgagtccggcttcacccgatgatgtctttgaggtaccataagttcttgattatgtttttaagtccctccttcttctctggtcattgactgtctgactataattagttagagaagtcatatctgcaatataaaatgtcatgtttatgattgagtataagaactggaatcgcaccatcaatgtctcaaacatactggcatcaaattttaatctttaagtactttttcgggcctttccgtgatctgtgctatattacggacccaaaattacttgttcaaacattattttcaaataattttcatgtatcaaagctcgttaagactagatggggtatctctacatagcgggtgggacccatggcgaatgggtgataaagtcaaaatacgatagcagaattgtttcttcacattttttagtgtacttgttattgactaatttacatatttacatttacattatttaaaaaatcagtaactaaataacactataatttaaactactctttgaaatatataagggaataacgtaagaagtatatggaatgtcaaacaaaattatttctaatttactactaataaaaaaaacattcgaaacttctcaagctatactcatcatcactccaaaaatcattttagaggatgccacatcagatctgttttaatactttctccaaatgtcatgtcagcaagttatttttgttttagaaaataaaagaaaaaatattttaataaatattgtcagaaaatcagtgttaatattttttactccaaaaacaaaaaacaaaacaatacttaaaataaaatattgatctttcttggattccaattaaaatggtttaaactaacaaaaaaatagttgaaaagaaacttaatattttataatttatttctgagatgacaaactccaattttttaatgacagtttttataaattttaggtaatataattcattagttgacaaaaaggtaatataattcattattttaattaaaaattaaatttaggtaaattacaattaactaattttgagaacattaagaatctttacacataataagcactataaactcttttaattatataaaggattaacatatatgcataattgaacaatatgctagcaatctaataataaaattagcttctacaaattaattttacagattatccacccattaagtttaattcgtttactatacataattccaactaatgaaccaaactcaacaaaaaccaaaatccaataattattcaaaacaaaacctcaatgaaaatgaatgaataaataaaaaaataatgaaaacaaacccaaagtttgttttgggttaagaaaaactatttctattacaatcatctttaataaaataaaaataaaacaaagaaaaggtacttcaatttgattttaaatatcataaatagatagaatgtaaaaatataagcaatataaactaattttatatttatagttaggaaattctaaaaaataataagaactaaaaaacaataaaaacataaattaaaatttaatataaaccgggtgtatcccggtattaactctagtcattagaaaaatcatcattaagcaatcccaaatgcgtttgatccaccatcaatgtcgcttggatcaaatcaaaactgtgatgattgacatatatagttaatacttttgaaacaattttctctgccacacaataagaaaggcgcatatgtatataaaaaagggaaaatttctgaaaaaaatccaatgccaaaaaactacctaaactttttttgttgtcagaaaatacacaaattaatctgggttggaaataaaaaaacacgacctattattttttccgactacctcctttcgctgtaacgggctgttaacaacgttaacctaattgtcaaacgctgttaattttacttacagaaaattcctgaaaaacacgatttatttaatatttgccaaaacaatactagaactttttttcgttgctagaaatatatacatattagtttaaaattgaaataaaagcatgacttagtttttttgttccaatttctcccactttgttgtaatggttatcaatagggtcaaccaaataaaaatataattattttctcattttctttgcacgtgataaataagaatagctataaaatcgatattatcccctaataaacccataatcgattgtggacatatcttgaaccctagttttaacataccacatctatctatttaagaagctaaccacaataaattgaagaaattaataagaagaacctttagtaacaacggaggtattttttaatttattgttgtttaatttatatgaaagatgttgaaaaaaacattagcaatttaggaaaaaacttacccatcaataacatgatttaggttgaaattattcaagaacttaaggtttcaaaggatttttttaatagtcaagttttttaagaatattttgtaaataaaattaacaacatttgactatttggttagggaaatcgaaaaaataaaaatagatcgtgttttctatttccaagttaagttagtttgggtatttttctgacaacaaaaatcttcatgtattgtttttggcaaatattaattgtgtgattgcttcgtctgtaactatagtttttttgttgtagaatttttgctgtataaatgatgactgtagctgtagattttattgctgtataaattaggtcgtgttatgaataaagatggatgcccattataaggctaatcatctaagcccatcatctagatgtttctagggttttaccctttccttgtactcctatataaagaacctttttctcaatggaatactacactcattttcttttatatctttctctagttacaacacgttatcagcacgctctaaaaggtagatatagagattcttacatttttttaagaacaatgtttacttatcgactcatggttcatagtacttattttatattattgaaacaaaacaatatgagccgatcgatgattatagtatagatcggtaaaagcatgttttcaatgattcaataaagaagaaaatcatgcttatcatttgtttctctaattactattgcatgattcaatgattctacaaagaaaatcgttaaagaagagaatcatgcttgttagttgttaatttttgtgatttactattataatattgaatatataaattaccaattttataattatataactaattttgtaactattcacagcctggtggtgggtgatgcaagcatgtattaatgttttagcattccagtttcgaatagttgcatctatattcaatatcgttttgtaaatattatattgtctaaaatccatttatgattgatacgatatcccttatttaactcctttgattaaaatgttatacatatcttatcacctttagatattgacttttccatattaaatatttgatttccatatatttgattgtgttattattatttttactaaaagtgttgcaagataattttctttttataagatacttgtaatattttatttttctaaatctttgtggcatctaaaaaaaacgaaaaaaaaaacgatagataatcttattttgtgaattttcgttacaaataatatcttattgttataaaatatctgtaatattttatttgttaatatattttgaaaattaacatatattcttgaaatttatatgatatgtaatcatttatttttaatatttcagtgaatcatgtcaaaaactcatgagctttgaatttggagctcttgatatcacgggagataactacttggcatgggcactagatgctaaaattcatctagattcaaaggatctccttgatactattaaagatggtaatcaaactccaagcaaagataaatcaaaagctatgatttttttgcgacaccatctccacgaggatctcaagaatgagtacctcaatgtgaaagatccacagatcctttggaacgatctaaaggataggtatgatcatcaaaagacagtgatcttacctaaggcccgatatgattggactcatctgagactccaggactataagtctgtaagtgagtacaactcagctttgttcaaaataacatccaaattggagttatgtggagagaaaatcacggatgcagataagttggagaaaacattctctacttttcatgctaaaaatattgtcctccagacacagtaccgtgaaaagagattcgtaaagtattcccaacttatttcttgtctctttgtaggtgagaaaaacaatgagttgcttttgaaaaaccatggactacgcccatcaggttctgctccattccctgaagcgaatgtgacatcctatggtcaagaaagtggttacaaccatggttgtggccgtggtcatggtcgtggtcgtggtcgcggtcgtggtcgtgggcgtggatacactggaggacgaggcaatggagttcactttaagaactcaaactctcacaagaagtgggaaaacaaagatggtaacaaacaagtgaaaataccgtatgcgaatatctgttaccgttgtggagcgaaagatcactggtgttggtgtcggatcccgcaccatggacttgggaccggtcaaagattgccacataagcaggagaggcccaaaagaagagaagcccataggataccccgagttgatagcacaagcgaggtttgacctgcgaagtggatacggaatcaaggtcaaagttacccggagtgaagtgtcgaatgggccgacagttgaagcccaagaagttcggagtcaattcaaattcgacgtttgaatagataattcaaagactgaaacggatatatttaagatagaataattttgtgtaaatgggaatttaatgtattctttgggtataaattatgggtcaaagaccatgtaaagggacacgcatttttgggcaaacacactataggcattttcctacaaagctcatagttttctcgatagtcatcaatctattttctagtacatttgtcctcaagaataatccttctcactaaataaataaatacttgagtgtgtgaatccgacatccatattttggcgccgtctgtggggacggaggattcttgagtcgtcagattttttctatatattacatttccgaagtgagccgtaatgtctggagaatatgctaccaaggcttcattagccgaaaccctcaagaccatgcaacaaactatggccgatatggcgcagaagttttcgaatgtgaaaaaaaccgtcgaaacactgcaaacaacccatgtatcactcagccaaaatgttagtactattcagtctcgtgtccgttctttgaatgcaggcaattctactagagttcggagaactatcttcggatcaccaaactcccttctgcgaaatgcaacgagtgatcaaacgaccccagatggtacaaacgcggataaccaaccggaagatggagaaacgcacctcgaagacgacaaccagttcgtcgatcaacacgagcaataaaacttcgaccagttcgaaaccatgaaagaagtaagccgggaattgaaagaaatgaggtcaaaattctatcaagcaacatgctcggagccggatatcaaccgggtcatctaagaagctaggcgaacacctttcaccccgcaaattgcaagcttgagaatcagggattctcgaagactcaacttagaaccgtacaacggtttggaagacccgaaaggctatctcgccgcttttctaatagccgctgggcgagttgatttgaacgaagccgatgaagacgcaggatactgcaagcttttctgtgaaaatctgtgtggacaagccctgatgtggttcactcagttggaaccaggatcgatctacaacttcaacgaactatcgacagtattttaaaacaatactcaattcttctggataagagcattttggataccgatctctggaatttatctcaagggccgaatgagacacttcgggctttcatcgctaaatttaagaacgtactttcaacgctcccgaggatctcacaacagtcggctctagcggctttgcgaaaaggattatggcatgattcgagattcaaagaagatttgatacttcacaaacctgatactattcaagatgcattattctgagcgaataattggatggaagtcgaagatgaaaaagaaagtttcgcaaagagaaataagcaagcgaaaccagcagctactttttcacccaagaagttcgaacctcgggagaatcaaggaccaaggaagtttggttcacaaccattcaataataacgttgaaaagtaatttcaggggaaaggaaggtcaaatacctgggttcgggatgagagcttgtattgtgatatacaaaaagtcaccgggcatctgaccaaagactgcagtgtttttaaaaggcatctcgcagaattatgggcaagcggagatctttcaaaattaaatatggagaacttcgtcaagcaatatcatgagtcgagagataactcagaagctcaaaactctaagagaccaagaccggctggcgaagaagaaccaagaagttcaaaagataaaatcaacgtaattcttggaggatctaaactttgccgtgattccatcagcgcaatcaaaaagcatagacggaatgttcttctaaagtcaagtttaagtgaagaagtagattttcaaggcgcttcaatatcattcaaggaaaaggagacacagcacctcgaaagacctcacgatgacgctctagtaattacgttggatgtggctaacttcgaggtttcaagaatcctcgtcgataccggcagctcggtagatctaatttttcttagcactttggaaaggatggggataagcagggccgatgtggtaggaccgccatctcccttagtagcttttacaagtgagtcagcaatgtctctcggaacaatcaaactaccagttttggcgggaaagatgtcgaagattgtagattttgtcgtttttgataaaccagcagcttataacatcatcctcagaacttcgtggatctacctaatgaaagctgtcccctctacggatcatcaatgcctcaaattcccaactccaaacggagtggaaacaattcggggagaccaagaagcttcgagaacttgttatttagctagccaccgattgaaaatccaatagcaattaacgaagcccgcaaagaaagaagtagtcccgagctttcctagcgggcaaaaggtggacgatgtcgtggtctgagtaattctagaagcagacaaaccggatcagaaagtttggattggagctactttgtcaggcgaaataaagggagctttaatcgagctgttaaaaagaaacaagaaatcatttgcttggtcagcagcagatatgcccggcatagattcgaatataatttgtcacgagttgaatgtggacccgagcttcaaaccaataaagcagaaaagaagaaaattcggagtggagggagcaaaagcagtaaacgacaaagtggttaaactcttaaaaataggatctataagggaggtgcaaaacccggattgggtggcaaacaccgttgtggtcaaaaagaagaatggaaaggatagggtgtgcatcgacttcacagatctcaacaaagcttgtctaaaagatagtttctcactcccatatatagatcgtctcgtggaatcaacttgccggaaacgaattgctatcctttatggatgccttttcgggatacaaccaaatcatgatgaatccagaagatcaagagaaaactttatttatcacggataggggcatctattgttacaaagttatgccattctggttgaagaacgcgggagcgacctatcaacggctgtttaacaagatgttcaacgagcatctcgggaaaacaatggaagtctacatcgatgatatgctagtcaaatcattgaaaaaggaagaccatgttaagcatctagaagagtgtttcgcaatccttaaccaatatcaaatgaagctgaacccagcaaaatgtacatttggagtcccgtccggggaatttctcggttatattgtcacaaagagaggaattgaggcaaatccaaaccaaattaacgcttttctcaacatgccatctccaagaaatttcaaggaagtataacggttaaccagtcggattgcagcattcgacaaagagtttctttaggatgagaagtgtgaagaagcattcggacagcttaaagcgtatctgtccactccacctgtattatccaaacctgaggcggatgagaagctctatctatacgtttcggtctcaggccatgcggttagtggagtcttaatctgggaagattggggagagcaaaaaccaatttactacataagcaaatccatgacagatccggagaccaggtatacgatgatggaaaagcttgcacttgcagtggtaacctcagctcggaagcttcgtccgtattttcaatcccacccaatcgaagtgttatcaaattaaccgcttcgaacaattctccatagcccaaaccaatccggaagattggcgaagtgggcagtggagttaagtgagtatgatatagagtacaagagccgagtcgcgatgaaggctcaagttcttgctgattttttaaaagaattaccggtacttggaggacaggagcagccggaaaatcagtcttggaagttacatgttgctggatcatcatcaaaaaatggatccggggtgggaatcaagttagaatctcccacttcggaaatccttgagcagtcattccgattattattcaccgcatctaacaatgaagcagagtatgaagcgttaattgccggactcaggttggcacaaggagttggaggcgatgaagtggtcgcatattgtgattcgcagctggttgttaaccagttcaatggtgactatgaagccaaagattcacgaatgaaggcatatcttgaggtggtcaaagacttggctaaaaattttaagaagttcgaactcattcgcataccacgaggagaaaacataactgcggacgcacttgcggctctagcgtcaacatcagatcccgaagtcaagagaatcattccggtataatgtatttcagaaaggaccattaaggaagaaaaggaaacactcgtcgttacaaggtctcgagccgcagcccaagatcgcggtgaacctgcgatcgaagtaccacctgtcaaaagacgaaagtcaaaaggagcaaccgtacctaagcctgttgtgcaagaagataataggctcgaagaaaatgttgaaccagtaacagaactcgccccgaaaaacactatcgaagcagaggctgaaccatgggttgacgaagacatccttcgagccgaatgaacatcccgaacaggaagctcaaatatttcacgaaatcgaccaaattccggctaaagattgggggctgattggagggagccaataaaacattacattgttacagagagctcccaaagaatagatggcaggctaggaaaatgagaatcgttagcgcgaaattttatctatcgaaggattctttgtatagacgaggtgtaagcgatccctatttactttacatctttgggcccgaagttgagatcgttatgagcgaagtgcacgaaggtttgtgtggaagtcattcctcgggtagggctatggctttcaagattaagaggatgggatactattggcctactatgatcacggactgtgttaagtatgctcagcgatgcaaacgttgccaactccacgcacctctcatccatcaacctttagagttattttcttcgatctctgccccatacccgttcatgtgatggtcgatggatatcattggaccattgcacaggtcaactcgaggtgtacagtatctcttggtcctaaatgattacttttcgaagtggattgaagctgaagcatatgtaaacatcgaagattcggcggtaaaaactttcatttggaagaatatcatatgtaggcacggcgtcccatacgagatagttacggacaacagaccacaatttatctcacatgaattcgaagctttttgctcggattgggggattaaagttagttattccacaacgcgatatccacaagggaacggtcaggtcgagggtgcgaacaagacaattctaagcaatcttaagaaacgattgagtcatttgaaaggaggctcgtatgacgaacttcagccggttctatgggcatatcgcacaactcctaggcgctcgaccggagaaaccccgttctcattggtgtacggaatggaggcagttgtcccaactgagcttaatgtaccaggacttcgtcgaacagaagctcctttaaacgaagaagagaattctgcgatgctggacgattcgctagataccatcaacaagaggcaagattgatccaaattcaaaattatcaataagcagcagctcggtattacaattcaaaaatcaaaagcagacctttctttgtgggtgattatgttttgaaacgtgtgttcgataacaagaaagaagaaggagcaggcaaacttggcattaattgggaaggtccttacattgttaccgaggtggtccggaatggtgtttatagattgaaagacttggaagacagaccagtccaacgtccttggaacgtggtgaacttgaagaaattttatgtttaaaaatgatacgcatttttgtacatgaactacggtgtggcttgatcccgaaatgggtacgtaggcagctcgaaaacaagttcagctattaataaaatttgttttattcattttgaagaatagttgattatacgaacgaatcaaggaaaggagttcgactatgcgaacgtacaaagcaggaagcaaggttacatttattcaaagggaaaatgaggaaaagatgccaaaatcttggacacacttcaggttaggaaatccttctcgtcttgcacaacacttcgaccccttggttggcgagatcgagaatgggcatcatacaatccgggatacgtgcgaattcagcgattccgagttcgatccagtctctgtggtgagagttgagggtgtgtaactcccttgatatcacggtgattctccgtagcatctgattgatcttctttcgaagtttcttcttttccgttgaacgtttttggtgttgagccgcgagagctttgatgaaggccatcgcaatttcttgatctatgcttgaaagatctttgattagtgcacacagaacttggatctgggatctaaagttgcgaagtggggagcgtcccctatccggcacattcggaatgtcctcatcgatcattctgaccctggaaaagtctggcatggactccgaacatcgaaggttaaaagccataactgcaccaaaaaagatattattataagagggactcttaactttcaaagatgtgattccattcaaggccggagtgattcgcggcagcattcacgtcgtcctactcgccctgcattcaaagagtatctccgagacgaatatttaaaaatcaaggaaatttggaaagtctccttaaataaaaacgggccaaagcccaaaagaaaagtccatacaaaaataaaaaaaaagggtttcaagtttcggggaacatttaagaaaggggtttaggaacaggttccttcatcgccggttcggggttcgagatggatgcctcgttcttaacatccacatcgggctcgttcttcacacgcttccaagggttgctgtcttcttcttcatcgtcaccctcttcgctgtcagacgggatcacttggatcagagcgtttacgagaccggggacttgacctcgagcacggaggtacatccgaagcatgtgcgggatcttcgccacacagtcgaagttcctccactcccattgaaagggatcgctctccatagcccttaccttcctctcgatgcgggcaattcgggccttgagcgtttgcctcttgaggcccaaccgttgcctctcatcgcataagcggcggtgtttgttgacgacctagaacaaagttctttagtttgagtgggagtctttccgataagaaagagggtaaaagacttaccttgtctataaaatcgtacgcctctttcttgtcattcgaaggaaagtgaaagcaagcatgaggaaagagaacgccggcgggctcaaagtcatcgccggacagaaacaatggacttctggggtcgagatggcatacggtggaggctctttcgttttccattcttgaagtgtttaccaaataaatttctgagatcatattttgaggcactaatgacagtttatgctcttatttatagagggttagggtttttactcgaaaccactaaattaataattgtggcgtgtctgaatgggttaaaccgtttttgggaatcgaggaaaaggcaattattgccttagaggcttgaagcttttcctattttccaaggaagaaaatggcaaccatcgcatttaagacaaacggttcattaaataaaagaaaaacaattaaggctcaagcacagtaaatcgaactgaccaaacccgagttggggagttcgcggaattaaaacgagttcaaactcacgttttcagagataggcctgatcaacctataaatctcgtaacttgaccaaatggttaaacaaagaagctatttaaaagatggactttgcaaatccatacttaaatctagtaaaaaccctcttgggatcattgtcttaaaaaaggtttaaaagtctcctcaggcaaaatacttgttaagaaattaaagcctacttagccgattaaaatagttcagaaataaacttcgagtttgctaacaaaaagggacaatccccattaagtggacacagccactacggatcttcagccacctcgagttcaggttgagttggctcaggatcgaccgggtccgcggcagccgtttcagtttcatccggttcgttggcagtgagctgttcggtaggcatcccaaattctgaaccatcgtcgtcctcgatgaccactgtttcagagtttgtggatgggggaattactggcgggatggctgccatttcaggagtttcaaccgggataacggacacctcgggttccacggggtcactgggacctgaaacaattatctcaaatcaagaaagacgcaagagtaacttattgtggttttatttcaaaattttgaggcttttaaaacttaccggcccaatctaaaccagactcgctcaaaggaggtgagtcggtaaagaattcctcgaactgttgagggttgaatgatgaagaaggaagagcgaccaaaagacttcgcttctctgctaaatcggcttccaactcggacctttcttgcttctcggaagagtctttatcatgggtttgatccagaaggaggaggttgctctcgtattccttgatgtccgattccagctccgtccttgctttctcggtttggatgaaaacgatcgccccttgaatcaattccatcccgtgacctttcacttcctttctggctttcgatgccgacctcgctaactcagcatccagtagtttggcgattgccttgtacttgagctgcaattcagatagctggttggacaagtcgtaggcactggattcagattccgagagtctgtcccgagcgtttgagagttcctcctggatcttgtcatacctctggtattgatcctgcagctcgtcgttcgacttcatgagttcagaggaaagattgtccaattgatcttctagtttttgccttgcatcagttgaggagcggagctcggactcgagggaagaaaacatgtctttccaggccaatactcttgttccctgtcgagcaacaacctctcatagtattcaatcatgtcgttgagttcgctgtttgcctgaaccaagggttacaaaggtaagttagcatatgagcgaaaaaatggagttaaaagattacaaaaaaaactaacccgagatgagtgataagcgtgaagaaggaatcgctcgcgaattgcagggcgccacctgtcgaaggttggcaggattgtgtcctgccgagtcttgaagcatcggaagacgtttcctctgtttccatcgctgtcaaagtaataaagaagatttgaaactcatgtatgggaagttaggccagtgaatcgaacaatatagtaagtaagagagtaaatggtaattactaacgtgtgagtgacttggtttgaggaaccagtacggccttaggattgacatctcggggttcaacttcttctcgccgaggattttcactctgaccggtcttttcgctcccaaatttggaagaagatgcgatgactggaggagggggaccaattgagcgaggtgggggagacaatcgaggagaacggtcagttcgagctctcgtcttatctcttttaggagaagaactgctgcgggttgctctttccctctttttccgatacaggtctgctatcggctcgctgcttaacctagtctgagaagcaggtcgaggcaagttgcgacgtggtgattggtctctgcgaggtgaccggctaccatggccttcacggtgaggtgtaggtctgtatgcaccagcagatcttgcaccttcagcgctaccatcatcaaccaggagagttctgctatattccttcttgtcaacagcggactgaaggaacgacttgtttgcttcacaagcctctgtcatcggcttggataaagtcttgcgacgagaagcgatggccctagcagaagttccgtgaggcagaggtggaggtggtggaagttgaagtagttgtccgggaggattcgtcatgagcttgtgattggcttcgacgaaccggtcgagagtgaaagaattccaaagggtctctccttcaatgacgatcttgaaaaattcgacgaactctacggtcgggagggttagagtgataaaagctgcgagttgaaagcaataaaatcgattaaatcagaaacaaggataagcaaaaatcgtacgtgacctaatttctacgaggtttcgcagaccacttcgatggaagcatatcggaaaggtttccaatcgaggcaggggttttcttgaccaggaaccaaggatgatgccaattctcatccttgttcaggagattcgaaatgaggttctgattggcgttcgggtacgccgagaagtacccagttttcttcgacgaactcctaacactgagaagttcattcaattcgggaaccctaatgacgaaaccggcctccgccgcaatggtgataatgcacaagatggtgcggaggagattgggcgtcaactgaggtagggcgatttcgagagcggccaagtatcgaaccaaggcttcaggaagagggaaggtcagtccgcagcctttgaagtagatttcatagacgcaaaagaacccgggacggtggtcctccggcgattcagtgggctccgacatctgcgaatctctcataatctcagccggaatccgacagagctctcccaatcgattgagggattgaagagtgcatgtggattgatagtgaggaccagcgatattgttcggccgggtgcaaaggtcgttactagaaccacattttcgaaagatggggattcgggcctttcattttcagaattcatcgtgagagaatgagtaaactgagggttcgaaggatagaaaatgtagagaggaagaagaaagggactttgctctaaaagaaaaatgaagcgtgaaaagtaataaggagagagtaaagcgaatttaccttacgcaagccagtgacgatgatggaaccgtcttggaagtcgtgggggaagtggaagagtttcctcgctttaatagtaaataattgatacgcagtcataattgtgacaaatttcacgagagtaattatgggtaattccgaaatcaaagcaatagcgtggttttggcgggaaatcagaaagtcacttggcgcaatcttcgccccttagagcattaaagtcttccgaattagagtttcacttcgaaagacttggggggctaattgttggtgtcggatcccgcaccatgggctcgagaccagtcaaagattgccacataagcaagagaggcccaaaagaagagaagcccataggataccccgagttgatagtacaagcgaggtgttgacctgggaagtggatacagaatcaaggtcaaagttacccggagtgaagtgtcgaatgggccgacaggtgaagcccaggaagtctggagtcaattcaaattcgaacgtttgaatagataattcgaaaactgaaacgaatacatttaagatagaataattttgtgtaaatgggaatttaatgtattctttgggtataaattatgggtcaaaggccatgtaaagggacacgcatttttgggcaaacacactatacgcattttcctacaaagctcatagttttctcaatagtcatcaatctattttctagtacatttgtcctcaagaataatccttctcactaaataaataaatacttgagtgtgtgaatccgacatccacagacatgggtttgttttttcctaaccaatccaaggaagatttaattggttttgcagatgcaggatacttatctgatccccataatggtagatcgcaaaggatatgtcttcacatgcgggggtacagctatttcttggcgctctatgaagcaaactatttcagccacatcttctaatcatgcagagattttagcaattcatgaagctagctgtgagtgtgtatggctaagatccatagttcaccatatacaagaagactgtggtatgtatgcagggaaaaagactccaacaattatgtacgaagacaatgcagcatgcatcgcacaactcaaagacggatacatcaaaggcgatagaacaaagcacatcctaccaaaattcttcttcacacacgatctacaaaagagcggcgatgtacgagttctacagatccgttcgaatgataatctggctgacttattcaccaaggcgctacctactgctattttcaagaagttagtctatcgtatcggattacgctgtctcaaatatctcgatgaatatactcataagggggagtaattgtatgttgcactctttttttcttaaccatggtttttctcattgagttttcctggtaaggtttttaatgaggcagcatttcaaatactttaccattatggtactataatggtcatcaagggggagtgttatgaataaagatggatgcccattataaggcccatcatctaagcccatcatctagatgtttctagggttttaccctttccttgtactcctatataaagaacctttttctcaatggaatactacactcattttcttctatatctttctctagttacaacaggttgtaggttttattaatttaatattattactttgtagaaataagattatggttgtatgtatttataaacaaaaaaaatattattggtaaattgtacttatgtgttatataatagaattcacaaatatcaaatttaatatatatatatatattgaaaataatgtaagttatatatatgtcataaaatagatatttacctattatttatatccataaaactaaatttaatatatatatatatatatatatgaaaactatagtaatgtttttaaagaaaataaagtgaaaagaaaaagagaaaaaagatacaaaccttctaaagaccataaaattgtgctttagaaaaacatgaacttatcagacaaaataattgaaaaaaaatactatttggactgttagaaaaaataggaaagctaaagcatgattatttcaattttggggctgtaaattttttagtggctttaaaaatttcctaccgtccaaccaatcatttaagttaggttttttcgaggaattttctgtaaataaaattaacagggtttgacgatttggttaacatcgttaacggcccgttacggtgaagggaggtagtcggaaaaaaataataggtcgtgtttttttatctccaacccaaatcaatttgtgtatctttctgacaacgaaaaaaatttaggtagttttctagcagattttaaatagttcggatttgttttgggaattttctcatacagaaaataaaattgcacaaaaaattattttgctaaaaatataggttcaggacaaccaatacatatgggttttttcagacaaaatatatcataaaattaacaactttaggtgaaattcaatatgataaggatttggtaaattgaactataaacaattgcaaatgaataagtgaaacaaaaaacagcaaaggaactgcacccgccaataaaaaaaaaaatcaagctaaggaaggctgtattttggaacatacagtttatattaatgttatactgctaaatttagttattttctaaaatttgtttagtaaacatattcaagtaatttttttctttgtaaatactcttaaaaatagtatatgttttttggttttctttgtttttgttaaacgatcttgtaatagcactattcgggaaaactagataattctcagatctctttcttctctgcctctgtaaatccgccatggctcaatgaactattatgtaaagactttttaaattaatataagtaatgttctatggaaaaaaaatcaagtaataatagtaggaaaattgtattgtataaccatcaaaaaactttataattaaacaactaaccattaaaaaagaagcagtgatattttatgtaatatatacatatttacccttgctgatacatgtgcctcaaaagtcaattctctacttctccttaccaccttgagtgcttcatttcttttatctcgattgggtttccaaaccagctaaataacgtgaatgtactatactgttatcgttatggaattagcgatgtaatcaataggattttatttgatttggaattcttacaaacaaatttaacactaaatacatatgtaactaagattatcatgaactatactattattttgattaaaaactaattacaagattgcatgtttttttcataactgtgaatattctatttgattatagaaaattaaaaattatgtcaagaatatttaattatattttaattatccgtaaacaagtttacaaaacaatttccttgtatttttatgatatatagtcctttttttgacgtgcatttaactcaatatttttaaatcttatttattgtatcgtttagaataaaacgttacttatttgacttctgtttaaatttaacttttgggtttcctatataatatcttttagggtatagttttttcagaaaatttaacacatatataaacaagtcttcaatcttcctctttattgctccatgttatttcataatctacaaacatcttctgtttaatctcaccattattgataatttcattaattccacaaataagaaccaaaaattcatcataaaacttataaattttgttgcttgggttttttatataccatcttaaggtttagttttctctaattaaaaacaattaaaaatcttataggaaaaaaggaagcaacctttgttgaacaaaaaagagacataggcctcacaactagcctccatctccttgtcactctcaccaccaccaccgccaccgcggtgaccaccaacaaccatcaccattataactaacaccaccactacaccatctctataataaaattaaaattgatttacgaatgatatatgaaaatagtatagtacaccatattactcctatacatcctaaatagtacaacatatttttacttacaaacactatctactattttataaatttaaatcctattttaaaaattcaaactatgttttatgtagaaaaacatatatttttgtgtaataaatttcagaattgaaatctattttttgaaaaagatatatagcaaaaaaaatacaaatgagtgaaaactaaactaagtgttactaaatcatctcaccaacaactctacaccaaaattgtcttttctcaccctttacatgctattttcttaatttatatatatatgatgctatattcttaattaagtatcaaaaatatctagttttgcaaatcacccataatagtattcatatattaaaataacaaagcatgtaatttttattaatcaaataaattattccaaaaaaatctaacattttgaaacgaatgggaatattaattatatttgtctatcgtatatgaagactcaactacgttttcaagacaaaaacaacgaatttttattttgtttagtaaacataaatctaagaatttgattgataatataccaaataaggccttgattctgaaaataggtaggactatggtcccccaaccttgtccaacgcatgtgttttgtaccatgcttcctcacctacccacttctctcaattccatatttatgtgtattcaaagaaatttggtggaggcttttttttgtatatatatataaactatggctaccagaaaattctcaaaaaaacagttatcagtttgaggatttgggaaaattttacaatttctatatgctgggtcaaaagtcaaaaaataaaataaagtatatatatatatatatatatatatatatataatcagaattgtttatcgtccaaaatactacggagtacgtaaactcttgtaaacggatcacacaagagtacggaaaccttagttaccgacaactaaaagtatacaatgatcaaacggacataagtggatttgattggcaactagtaaagtcaaatagatatataaattgaaataataaataaaatggatacaaattaaaagaagtttgacccaaaaaagaagaagaaatggatacataagagctaataaaaagaaggtttaaacttaaaaaacaactggattctctttaacacaaaaaacttgagatgcattttgttgacgctaatgtttgataacattgctccttaggcgtgctatactaggggtgtgagccaaagcacaattagccttacctaaatgaattattgtgttgcttaggcatgttaaactgagagtatgagtgtaaacaaatatcagcaagttcgtcccaaaaatgataaattaagcgatgaggtaaagagattcctctaatttaaaaaccacgtagcgctaaacaattaatctaagttttgaattatgatgcagatattgctgatcgagaattttacaactaggcaaccaaagttaagaaatagattgagatttttgattaggttgaggcacaatagggtgtggttatggtacattgttttgtataaggatcatgtatgcgtgggtggtatgggactatgagagaataatacgcgaacatgatcaataaatattgacaaggtggttgaagaaaaaaaaagatgaaactcgggttcatatagaaaaaaatccaaagctgtgaatgatgcatgcaaaattcggattaacccatttatttcttatgtataaaatgattagtgcgtgagataaaaaaatactcatgatagatagactagataaaaaaatactcatgataaatagactaagatttttattaggattttgtaaaaaaaaaccttcaaacttgttcatttttgcaattttatttccatttccaacaaatgtaaattaatcctatgaagtataaaataatacgcattataacatttttgcctatttttgctattatcaattttataaaatattgatatatagttttttaaaccgaactcgaaaagaagagtttaaccttaccttcaaaattttaaaaatataatctaatgtgtgtgaccttataaacgtttataatatacgtataaggatcatattgcgtatcattttagacttcaaatgatgaacctgcatttgttggagatgaaggataaaattccaaaaatagattagttaaagaatttttttgcacaaagcctatttttttctttgatgtatgtaagcttatcaactgaggttggtcaaaaatggattgaataagaacatgtcgaccataaaccaaataatttaggttttagatgttttaacactttgctagaagccgagtatatataaaaggatatatgactcaagttttaggaccgaattttgtatagttggtttggatctccataatctcagagcttggtggtcaagattgtgcctcgtaacctcgttatccaaaaatgaagtagaatgtgagtcgaatatcgtgaattcggtaccctctcgttagctcatagtgcgttgaaccctttatctcgaatttgtcaaaacaaattgatattttgtcgtgaaaaaaaaaagttcagacgaaaaatagtggtcacaagtcttgttcgaattgatacccgaaaaaacatcttaaccaacttaaagtaaaaatttaaaatcggaaatttaaatattaccctaaagttttaaaaggcggacttttcaacgaaggtttatgctaaggttaaaaaaaatacagaaacgctttctcacatttccatttcaataaatatatatcagtcgccacccaaatttcagaattgcttctcttagtatttgctttcaccaacccactcgacggagtctccaacgccttcctcctcattctccactctcacaccaccaacttctgattccagatctcaacgatgcaaagctccgccgtattctccctctctccgtcgcttcctctcctaaaaccacgtcggctctctctccgccaccatcccataaccaccgccgcttcttcaagcgatctaaacgtttctccaaatgttgtctctattccttctttatctcgtcgatcttggcgtctcgcttcgtctgattcgcctctccgtgcttggtccggtgttccttctccgatctctcactccttagacacgaatcgtttcagaaccgccgctactgcagttcctgaaagtgctgaggaaggtgataacagtggtaaattgacgaaggttttggaacttggcttgttgttcgctatgtggtaccttttcaatatctacttcaacatctacaataaacaggtactcctttgcttctctacatgcttagtctactccactgttttgaatcaatggagaactcagaaatcttatagtcaataggatactggagagagattttgttctgctgattccgaaattggtactgttcattgtgttttggctaattgttgtaagttcatagtttcaatagattgaactaatcttaacgattgagattcatttttgtgtttaatcgtgttttgattaggatgaagtgttcagaaatttgagagatattttgttctgctgattcagaaaatttcagtgtttattgtgatttggcaaattgttagaagtctaacttttgattctatcaaaaaatgtaaaggtttagttcaatcatgttttgattaggatgaagaattcagaaattttattatatcttatacaggagagagatgtgtttcactgattagttgattttattgtttgattttgagggaatcaatagttagtttcttgtttcttcttattcttgcaggttttgaaagctctacatgctccaatgactgtgactttggttcagtttgctgttggtagtgtgctcattactatcatgtgggttcttaacctgtacaagagaccaaagatcagtggtgctcaggtgtgtgtgtgtgtgtgtgtttttaatggaggctggtaaaagctgcttgttcttgagatttgtcactcactctgatatgtttaccttgatagctagctgccatcttgccgcttgctgttgtgcacacacttggtaatctgtttacgaacatgagtcttgggaaagtttctgtttcctttactcacaccattaaagccatggagcctttcttctctgttttattgtctgctatgtttctcggggaggtgagctcttttttttatttgggtttttctttgacgtctcggagttgattaatgcactcgtacctattgtcctcctgtctggactaagttgctatgtgattcttgtttctaatggcttgttaatgatagtctatattactcatcgcttttgtttgatttgtgtaaagcataattcgtttactaactctttcttagaaacctactccatgggtactcggtgccattgtaccaattgttggtggagttgcacttgcttcaatttcggaggtctcattcaactggttagtttgtcgacgagtattgtgacatttaagtcggtggttatctattcttctgataactctcagatatttactacggttacttgttttgtggtagggctggattttcgagtgcaatggcatcaaacttgactaaccaatcccgtaatgtgctgagtaagaaagtcatggttaagaaagatgtaagtttcctatgtgtggatcaaactttcaatcttcgtgttttggaataaattaactaaaacttgattttgtgtctcggcaggattctcttgacaacatcactctcttctcaattataacattgatgtctctcgttctgatggctcctgtgactttctttacggaaggcatcaagttcactccttcatacattcaatcagctgtgagtttagtatatattacgattctattttttctatatccttctcaaatgtttgcagttcctaacaaccaatctcggttttgcagggtgtgaatgttaaacaaatatatacaaagtctcttatcgctgcactctgcttccacgcataccagcaggttaggcttttttttctcttaatgatttggttgctttacttgagtatataacgaatttgaattgacatttctgaaatgtggataatacaggtgtcgtacatgatattggcgagagtatcaccggttacacattctgtcggaaactgtgtgaaacgtgttgtggttattgtgagctctgtcatcttcttcaagacacccgtctcgcctgttaatgctttcggtaacatccagtcttattctcttctcggcttcagtgaatacgcaatactttggaactcattgtcgtttatttttgtctctgcggcaggaactggaatcgcccttgcgggtgtcttcttatactccagagtgaagggtattaagccaaagccaaagactgcttaagcaaatatcggctaatacctaatgtcatatcactcccgcgctttggatttgtatacaatttctcgagctaaagttttcagatagatggttttattcttttgcgggttttttcacgaagtttcatcatccctttctaagcttttcgctgcagccatcggttctcttagagtttgttataagttctcttctgtgtctagacaaatgctaaactcttaaatttcttacagtttttccaagaataacttgtcaacacattctcattactgcttttagtttacacgtttaaggtttattaggaggagcacgtgaattgttccttttgctatggtgataaaaagcacaatattaagcatttgaggatacctcttgacttgcatttgcacccgattcagtagtctgcacgagttgtttgaactccttatccacagttcaatacctctaagtgatatggattcgacatattttaaagtgatattatacttcaaaactttagtttatttccgttaaggacattcatcgtgaacaaccataatttgaatcgcacagaaatttttaaaaatgctttaaactattagatctcagtaattatttaacataatttcttgtatgccataaattttgtatataaaatcattcttccatttatgctatgcccaaaagtcataatcttagcattatacagctacatatttactgatcataaaattacgtattgatcacataatttgtatctattttttaaaaggttaatactcttatatatcgttgaattaaaaaaaaaaaaaaacattcgaagacaataaaatactcgtttctattgattcgctaggtgaatttacgaaggaaaattttgatttttggtcataaaaagagtaatctcgtttgaaataatatatttgttttgagaaataatctattttgatagttgtaaagtgggtaaactgaatcgaaccatgtttacttttttttttttttgtcgtcattttcattacttcacaactaacttacatgagtccatgatattacatattgcatctttttggatcttgctacttttgcgagatgatcagctacatcattgattgtactattcactttacttacaacaaaagaagctgaaattgtagcaagtttttgtatgtcctggatataagcggccaaaggggagttagttgtggggcatgccttcttgtccttttgcagatatggcgctacattctgatacaggattgaagcatcgacacaaaatttaacctcttcgtaacccagtctccgtacttgcatcattgccgacctaagggcttccgcttccgcttcaatcgaagagttagttggaggtatagaggccatacctttgagaaccatttgagctttgtcattgtaaaggacccacccaattcctgcacattcagttggggaaacccaagatgcatccacaaagcagcagtatgctttggcttctttcatgatatcttgtacattccccattaatgccccggtcttctgttggtcttgttgagaatttggttggggctgagtcaaatcgatgagcgctttgttgataatatctggtatagaccattttcagttgttgaagataaggtcattgctcattttccagatacgccaaccaatgaaagggaatagacttacatcctttctgtggttttttgtcagactcatcaatttctcaatattctccatataagagtttaagttccaagatgcacctggtatagaaaggttcggtgcctgctcccagatttctctgctgattcggcattgaaagagcaaatggtttatgttttccggagcttcaccacatctgaaacaaatgtcatctgaagtcaactttctcctcttgaggttatctgcagtcggtaaagcattatggagtactttccaccaaaagtgtttaatctttggtggagtattaaggttccataatgttgacttttaaattttatgataaatgtcttaaattatataaatacgatctaaaagtaactttaaatttaaagtttacatttagatatttgataaacttcatttaataatctttgtcaatgtgtctatataacctaatgttttgttcttgttttgttcttgtttttttttttttttttttttttttttttttttttttttttttatgaaaagtattattacctgatgtatattaattgttatgttgtgattggtttctgttggagcttctctgcttatgtgtatgagttgttttgttttgattggttaatctttttaatgatgtgtctagcgagagttattttattttaattgtactatatttatattgtgatgtttctcttaaattaaaaatttatgactatatatatgacaatatatatatatatatatatatatatatacattattgagatagataatgaatacattagtttatcattaaatttaataggtactgatcttcaaattattttcaaacgattctctgtcaatttcttgatatttttaaactaaaatccattttttaaaaaatagactgatttaacaaacattaaaagttaattgtttctgtacatgccacggatcgaaaatgagtcagtaaatgaatattttttacctaaagtcacacattgtatatacctaagtaaatgatacatgaccaaaattagaagatcaagaatccttatattacgaaaatatccggttacattcgttgaatactttaatgaagaatctaggatataattaaagaagaagaaaatatgtaagcatttagaaataaaataacttggagatataagcaaaccataaacacgtccatatgaatgaatggtacactcctcgtaaataaataaatatatgcatcaaaatgagaaaatcttcacttttatttattcttaatacgtcagattctctgaacacaaaatgatataatttgtagataacttactcaaaacgtaagaactcactatctattatcatttattaaccaccatctcattaatcttataaatatgtactcattagattgtcaaaagtaaaacctcacaatacactttaaactacaaatcaaaacaatggcctctctattctcttcagttctcttgtctctttgtttactctcttcactttttctctcaaatgcaaacgctaagccaaaactaggcttcaccgcggatctaatccaccgtgattctcctaaatcgccgttctataacccgatggaaacctcttcccagcgtctacgaaacgcgatccaccgatccgttaaccgtgttttccatttcactgaaaaggataacacaccacaaccacagattgacctcacctcaaatagcggtgaatatctcatgaacgtatccattggaacacctcctttcccgatcatggccatcgccgacaccggaagtgatctcctctggacgcagtgcgcaccatgcgatgattgttacactcaagttgatcctctctttgaccctaaaacgtcttccacatacaaagacgtttcttgctcctcaagtcaatgtactgccctagaaaatcaagcctcttgttccacaaatgacaacacttgttcttactcattgtcttacggggataactcatacacaaagggtaacatcgccgtggataccttaacgctcggctccagcgatacccgccctatgcagcttaagaatattattatcggttgtggtcacaacaacgctggaacgtttaacaagaaaggctctggaatcgtcggactaggtggtggtccggtttcgcttatcaagcaacttggcgactccatcgacggtaaattctcatactgcttggttcctctaacttccaaaaaggatcaaacgagtaaaatcaacttcggaaccaatgccatcgtgtcgggatcaggagttgtctcaactcctctgatcgcaaaggcgtctcaagagaccttctattacctaaccctaaaatccattagcgtgggaagcaagcaaatccaatactcaggctcagattctgaaagcagcgagggaaacatcatcatcgattcaggcacaactttaacgttattaccgactgaattttactccgagctcgaggatgcggttgcatcctctatcgatgctgagaagaagcaagatccacaaagcggtttgagtctatgttacagtgcaaccggagatctaaaagttccagtcattactatgcattttgatggagccgatgtgaagcttgactcctccaatgcctttgtacaagtctcggaggatttggtttgctttgccttccgcggaagcccgagtttctccatatacggtaatgtggcgcagatgaactttcttgttggatacgacactgtttccaaaacggtgtcatttaagccaacagattgtgcaaagatgtagttgtttcatctcaacatgtttttcaaaattgtgttttcaattacaataatggctgatttagtttcagccttagttcttttgaatttttctaattcacatgtagtagtctatcttttcaagggagagttaaattctcgaccttttgttcttttggtgatgctttgtatttccttgaattttcaatcacaattaaaatcatgaaaaccttatctccggtaactattttcttgtccatctctatactctgttttagtttataatcatctctatgatgtaaaccaaatatgacaagacaattctataattttgttcaaaatttagttttttttttcattttactaataaaatctagaaatactacttttgtgtctattatattattgtgatgaaatacttataagaaacagatgaatgtgattctaattcaatattgcttttaaggaattatattggtcctactattctattttgatgtgttctatattttactatattcaatgggattatggattatagaaatattttgaaaatattatactattatttataaataattcaattagtttttcttcttaagtttcttataaaaaataaatatatcttataagaaataaatatattttatatttcataaaaatcatacattgtacatatctaggtggatgatacatggcctaaattagatcatgaatcataaaaatccagctgtagataaacataacaaggatgaatggtacaatcctggtcaaaaaaaataaaaggaaaagttatatgcattaaaatgagaaaatcttcgcttttattgtttcttatttatcagattctctaaatgtaaatgacacaatttgtagataatttactaaaaatgtaagaatctcatcatgtactaccatttatgaatccttatccaattgaccttataaatattactcatcagattgtcaaaagtaaaaactgaccattcaggcaatcacttaaactacaatctaagaaaatggcctctctattcacttcacttctcttgtctctatgtttattctcttctcctattttctcaaacgcaaacgccaaaccaaaactaggcttcaccgcggatctgatccaccgcgattctcctaaatcgccattctataacccggcggaaaccccttcccaacgtatgagaaacgctatccaccgatcctttaaccgtgcttcccatttcagtaatctttttgaaaaggatgcatcacttaacgcaccacaaactgatatcaccaaatatttcggtatatatcttatgaacgtatcccttgggagttgggacacctcccgtcccaatcatggcggccgctgacaccggaagtgatctcatctggacgcagtgcaaaccatgcgatgattgttacactcaagttgatcctctctttgaccctaaagcgtcttccacatacaaagacgtttcttgcccctcaagccaatgtagggctctaaaagatgatgcttcttgttccaaaaaagacaacacttgctcttactcaatgaattacggggataactcatactcacggggtaatgtcgctgtggataccttaacgctcggctccaccgataaccgtccggtgcaggttaagaatattatcatcggttgtggtcacgaaaacgctgtaacatttagaaacaagagctctggaatcgttggacttggtggtggtgcggtttcgctcgttaaacaactcggagactccatcgaaggtaaattctcatactgcttggtacctgaaaatgatcaaacgagcaagattagtttcggaaccaatgcggttgtgtcgggaccgggaactgtctcaactcctttggtcgtgaagtctccagagaccttctattttctaaccctaaaatctattaccgtgggaagcaagaatatgccaaccccaggctctgatatcaagggaaacatggtcatcgattcgggcacaactctaactctgttacctgggaaatattatttccagattgagagtgctgttgcgtctttaatcgatgcagagaggtcgaaagatgaaagaatcggttcgagtctttgatacaatgcaaccgcagatctgaaagtcccagtcattactatgcatttcgatggagcagatgtgaagcttgattcctataattcattttttaaagtctcagatgatttggtttgctttgcctttggcttgaacttgattacgagggatgggatatacgggaatgtggcgcagaagaactttcttgttggatacgacactgtttccaaatcgttgtcatttaaaaaaacagattgtgcaaagatgtagatggttcagcttagcatgtggctaatttccttttttcaaaagtatgttttcagttatcattatggctgatttgattttagccttaaaatagttatttgaattcattcagcaggaccatagcactgcaagagaacaaagcctttttcgacagactttccaacgatacataaacggtcggaaattctcgacagttttgtaatgatattccgacggatttcgcacgacatgtttcccgttctcgcactgcaaccggtttcgcaaccatagttatcgtcagaatagcgtagagaaattgtcagaaaatacctcatcgaaaacccgtcggtaatttgtaacacgtttgcaacgacattcagatttccaacgagataaaatcgaccaatttatgtcattgaaaattcgtcgaatacggctgtttccgacgttattccgacgatttcatccgttggaaatatcctatcgaacgttatagcatgtaataaaatcgcctttaaaagcgactaagcttgcacctttgtgtccaaaaaactttttatcaactagagataaaataggttattagtttaccttgccagaaaaataaataaaaacaatgtgaaacttaagataaaaggcagacgagattttttaggttctgtaagacaatcctttgctattttgttttgacatgcatagaagttaacacatactacggaaatgttaaaaaaaaaacgagatagtgtcgccatgataactgcaatgctgctgaaaccctaaactttattaatgaactaatgaagccaaatcatttttcttttatgattaaaaagttgccaagattcgtgctcactctgtcaaagacaacaacattatcatttttcaaacagtagttgattaaactaaattaaaaatgggtatataaaatgagttataacgataaagacaacaacgactttccctttgcttgattatttaaaacaagtccctgataagaagaagacgtctagtggaaaataaaatgttacagaaaaggcgccaatacacaattgtggcgacattatgaacttgctcaataagagaaaactttaaagaaaagagggggatattaaacaattataacaaatctaccaaaattttgactataaatagatcactacacatatggatttgtctcatcgaagtaaatattaaattgaaagagcaaaaaaataagtcttaataaacgcaaagcattaaagagatggcaaagaacctcaactccgttagcttcatcgttctcttgctggttcttttggtggcttccaccggtatgaatttattctctaatctctattatactttgtgtgtatatgtatatgcaaaaaacatttacataataatcttttgctgatgaatttactgaaatgtcaaaatgtagaaatcctgaagagcgatgctgcatgcttcacgttcttaggcgagtgcgggccggagccgtttacaggttcaaatgctgattgcttagcgtgttgtgtagctctctacaagagtccaccagtttgtgctggacgtgttgagggagtcccggctcactgccattgctacaaatcgtaaagaggttcaaaataaacctcatatatataattaccaagtgtaacttttcttttcattcggtgtgataaggacattacatgtgtgtgtgtgtgtgtctgtgtgtggtaaactggtgtctggtaagtttcttttgaatccaaataaaacatcaagggcaaagcttcactgcttccccttaataaatgtaagctcatgttgtcttcacttttgattcgttttgaataataaactcgttttttgttccccatttcattcgaaactatattcaaatttctgtcactccaaattatctaacaaatattgaccatttattggatagtaaaatctgatttaaacatgtatgttgcatgctcaaaagagtatagatgactatcataacaaagcatgagctaatctatatatttgaaataggttttgagttggaaatttattactctcgacttccaacctttttactttccaaccttttggaggaatacttacgtttctaaaaatgtttactctcgacttcccacctccttacaagccaaattttgtccataagcacacacagaaagaacacgtttaagacaatttttttttttgcatgactaggaaagtggactaattaagttgttagagatatgttaagattacataagtgttttatacttttatgtaaactttagtaaaaccgtgaagaacgattataacttttgtattaagttttcttgcttaaagcattacaagaggcatagttcattatttatactaaagctaactcttgtaaaaccctagttgccttacacattggcattgtttggtaacaagcttagggcattgaaactattctttgtctcaatatgagtcattgtcctttcctgcaattttgttccttttgcaacggctctgtttcgtccttgtttctcttcatcaattcttttgtcttttgtgacaagttgttgagtgggcttgatgggcctttcggtttgaatgttgttatagggctgaacaactgggcccaatcacaatccttcaccaagctcagttttgagcttctcactaatattttagacatccatcctagatttgaattctaaaacatcggaaatattcgattattgccttattacttgtattgatttgagctatgaatcttagagatcgctcaacgcttgtatattagttaaaaaaatttaagaaaaaaagttatattgtatattaaagagttaaatgggcctcaaatctgaattaggataaagaatggctttttagtatgagtgggtggatactaaaatgtccaaattaacaacgaattgagtatcatttagtaaggacaactaactggccagtccggaaatggagatgcgggaatgtgtttggagagaatagaaagtgtagagaccgtgtgaagtttgtgaaagacatcgcacaggaggtggcaaaggcaaataattgtggcagcggtagtaacaattccaggagtcggatggaaagacaagtccggtggagtaagcctagcttgggatggtgtaaactcaacacggatggtgcttctcatggcaatccgggtttagccatagcggggggagcgttgagaaacgagtatggtgagtggtgttttggttttgcgctgaatattggtcgttgttcggcgcctttagcggagttatggggagtgtattacgggttgttcatggcgtgggatcgtgggattacgcggctggaacttgaggtagactccgagatggtggttgggtttttaaggacaggaattggttcttcccacccgctgtcattcctggtacgtatgtgccatggcttcttatcaagggactggatagtccggattgggcatgtgtatagggaggccaaccgtcttgcggacgagttggctaactatgcgttcgatttacctttagggtatcatggttttgcttctcccccgagtagtttagactcgattttgagagatgatgagttaggaacttcggttccaagactagtgcggatgtaattttaatttcataaataaattctgggaggtgtttacctcccggtgcctaccaaaaaaaaaaaactaactggccagtccggagaaaattggggccacatacaaaacaaaatggggcccaatagtgtaattctatatttaatattttgtattattatataatttttatattcatttaatttattttgtttgataaaatgtattaaaaagtgaagtgtgatttaacttttctaaggattcacactaaaacaataattttatttttcttttagtcatatttgtttttgtttaggtatgtaacatttatttacgtagttacatactacaactaaaaaaaagaaaatccaaaatcctaattggaacccacaaaaataggggcttcatacaattgttttatttggctgcccttagggccggctcgaccacgtgactgtttgaattcttgttttttttttgtcatccgtttaattaatgatactcaaacgaaccatttatgagaaatattatttatataagtgatatgatacggtttggtacgaatgtttcgtgttaaaaatccgtttttatattcgcacaaagagaaactaaaaataaagaaaaataagagaattcatcattgtcgatttagatctccttcagatatactaagaacgctgaccatttggttggagaagacacaatcttcaccaaatctgaacagtctgaaaaaacgcgacatcttggttatcaacttcaatcatacatctcatcgccaagagaaagccttccacttcggtataaagtggagataggcttcgtcgggtgtttgtttgaatttgtatctatgtttatattgtttagtgaatgcttccactaaaaacatataactagttaatacaaatttaaataaaaagattgaacaaaaaaaaatgatagtgaacattcgtaagattgttgaatattacttctcagctcacaattggtgactaattattgatgaacaacacaaaactcacaacataactcaaggaaactaattaaagtgccaatgtaaaaatatataataaacgagaaaggcaaaacaaaaacaaagcataaagtggatttgggatagatgaggaatagaagcttaggtcatggaatcaacggtgaggatggtgctaagattcatgggatgcatgtattcaggagagccattgaggatttgttgagctatgattctacttgctttttctgatgggtgaaaaggatcccaaaaggcaaagagatctctgtttgggcaaagatttgataatggagtgcatagccctatcccattgtacggcccttgtccacaacaagccaccttcgacgtgacgaatcctgccaaagattagatcgtaaatcactaagtcaattcgaggagcggacgtaaaatttaaactaaaatgaaaccaaactcggtatattaaaaataaaatacaatttgaaaacgtataacattaagtttaataaattttcgtattttttttaattattcaatacatcgtcgcaactaaaataaactgaaatctttatgatttatcaatgaaatttaagaaaaatcaatatatatatatatatatatatatatattctcaaaactaaagacatatataacttgatgttcaataaaatattaccttgttttagaatattgttattttacttaattgttttttttccttttcttagaaaagaaaatctataaaattaattatgagggacaaattaataagaacaagtaccatatgcttgtgggtcgctaatgaagtccatgtgcatttgttgagtattagcggcaatgaaggccgaagatccaacttcgttgttgaggtctgttatcatttgaattagttgtgggttgaatagtgacgcggctcgttggagttcggtagcacactcgccgttgcggctacgttgcgccagctcggccgggacgcaacccattggtcctgttccagtcacaaggacacgtcgagcacccaaatcgtacattttctacaaaacaatttgaatgatataagagataatgaagtttcaacatgtatcatactattaattcaaataagtaactagtaatggcgaagtattgatgaaatttagaggagatagtgagatatttcatattaggaccatttttttttatataaagctattgttccttttcgtttgaataagccatacgtgatgaaatagcttgtaaatgaataaactaacccgtaagactttgcggtattcagaaatgacaaagacaacgtagtcaggaagagagaattgacgagatcttgcagagaaagggaccaagtagtagttgttgacgaaatcattgcctccaagtgttattaggacaagagctccgttcacgagccgattcatctcttcttctccgaccaacccgcttactcgaaccttgtactgctcgaagtactctagctgctttgtgatcctaataatattcagctgcattcaaattgtcaaaacacctcttagcatcaagattttaagaatgccgttaactcgatggtaagatttattccggttgaacttacaaactggattccggtgtcgttaaggattccaatacccgcggaggcgaagttagctccccttaagagtttgtccttcttcagcattggactaaggtacggcattggagactcttgacccaaatgttcacctataaaagatcattgttattattaatgtaattttggtaacgttgagtgttcattttcttggggaacaagaaattaaaagcttactgatgagatctggaatgtttagaccattggagaaacggcccgtaggacgatgagttgggaaatcgataccataagggtaattatcggcacgagcagtggtagcaagaaagtcattgttaccattgtcaacgagagaatctccaaacacaaggaaagccctagcatttgcttgcggaacaagtaagctcgtcacttgcagaatgcaaaaccctagtagtgccaacttagccaccgagttcgtcattgtttatagatttaaaatggtaatatttgtgaaaaatctttgaatatgtttctgtgaactctgttttggtgttttgctatgaaatgagaatgtagaagagaacatgattgtctctatatatataggtgcatatgtaaaaagtaatagagaggaaaatgggggcattaatggaggtcttcaccagcttttacctattggtgttagattgattttaaagggagacaactctaaatgtactagagttgtgattttggttgagaataaataagtgatgatggtaaagtttttttattattatttattaaataaagtgttatatttttcatccatattacagtacttttctttaatttgctatatataataacaactatacaatttatcaacctaactattcatccatttactagaatttttcatttatcagcgtttgcctaatccactctcgaatttgtgtaagaatataaataccatattatatattttttatcaaaaataaatgtgagcttgtgcatcgaattattgaagtgactcatctaaacagtgagagtaacaaactcagagaaaccataagaaacattcaacatttttgtaactttcaaaatggaatctatttggaattccctgtcaacatcatatatattgctaataattatgcatatctgagaatgtattaagtgcataaatatttaaaacgaaattatcatttttaatattgcagaaacgaaattatcattatcatagtatactagttcaactactaattcaactactaattcaactaggggcatacaaaataattaactagaatatagaactatatctatataattattaatcaaaactattagatgaaaaaaaagaactcagtaaaagtcataatttacacatatacatttttagagtagttaaggaaaaagttaaaactacttttgggggcgagattaaaagacatgatgtggtagacccagagacacggagaagtttaatttcatgccaacattttcatgcgcttcaattttggcgttttaattggataaaaaatttggttgtaaaaaggaaatacaggtccctttgggaataggatagaattatttgaagtactttgttcagatttactcccagagccgcagagttagattctgacaatgactatgacattcaggttgctttttgtttttcttttttcctttgatatttggaaggttttgcaaccatctagagagaaaaatgggtgttcacatgtataaatttatttctgtagaatttttgttgcatatttgttcacataattactataaaatttagggctttaaaatttgaattgtaggtacaataaatgtagctgtaacattagtttagtaatataagttaatgatctgatcggctgcagaatattaattaactgacaattttagttggctaaacaagacaattttagttttggtttatatcaaaattaattaacaagactaacacgatatatattgactgtaaaatccagcaaataaatatttatttcttcttagtccttacaaaatttatctcaagcagatattgtcttaacaaatttaaacaattcgacttttacattaaaaatacttttaataattatttcctttatcggtcctattaattttaatatattacaaaatctcaaggattatatttaaacacaactaaccatatttatattgatcctcacgcaagataagcatacgcaagataagcatacgcaatttaacgaatatttgtgcctcagtagatgcaaatcttacttaaattcataatcacaatctaaattccagcttttcttattttcatttatttcatattctgaaatttgctctaatgattttctctgcatagtccattttaaccaacaactttatagctaaaacccataatcatcaatctccattcctggagatttttacatttaaatatcctataattaataatcaaacttttttcaaaattaaaatattataaaacgttttaaatatttataatataaaactttacaaaatttcaaatattataaatatttgaacatataagaatctatatttttcttttgaacacatttggaaaataaataatgagtttactacaatatttaccgaagaatgctattgaattaaattcttaagatttatcatatttaatgaaagatattttgcatcttgattctttgtttttaaaatttcgattattttgtgtgatctcaactaactactcccgcataaaatctctgatttcttttctccacaatatccattaagtcactcttcaatatgagattggtaacatattcattaaaaaacaaagaaaactcgaaaaagtatatctacaacaaagttagttgatctatttcttattttaatatattggtcaaataggtttttctaatagtttaaacctaaatttatcctcagtttcttgcacacttaaaagaaactaaaatttcctaacttatttacaaaattcaaagagaaataaaataatctcaaatccttcaaatgaattagaattttggggaagtcaaaacttgcacaatcgaaattgtacttagggttcgttcgagaaaataaactttgtgagaatctcaaagaacaacataatcgattgttaaccacagatgttgtttttgatattattaatgaaaataagtgtttaatcgtacaagtgtttggatttgaaataggaaaagtgtttctgccttcaaagtcggagctattgtgttatccgaagttgagagcattttcttgtccctcctttgtgaagtccttggaactccttatacactgctgatagatcgcctctccagctatattctcaaaagatttccatttatcctttggtcggatacatgatatatttgcctaagaaaaattccttattcttcaaagacttcggaaaatcttctgatttgatattatcttcgaagattcttccgtatcatttctcagattatcggaaatgatcctgttttcctaaaaatgatcctttgatcgtgataggattttacaagtatctgcttcggatattcttgatgtttgcctcggagtactttctcttggttcattgatcgttcaagaggtgacttcggggtaaccggtatactttggcacggggcatggtgatgactgtcccttgcgctcagttgattgtttcccgaggcgacatagacggttcccaaagcgttttcacaatcggctcgggatgtgtttctaggactaacaccgagtccttttatatgaacttactctcgggagtatgatttgcccgaggataccaaaccgttgcttcagagaaggaaaagccatcctccaacgattggcgaggctggaggttcgagttggcaggatgcgcccgagcctcaggttcttctaaaggtgaaaatcgaagagctctactttgcaccagaagaaacagagaagcttctgcaagctgcacatgtgctggaaatagcgcgggctcaaaagacaaaacaaaccaaaaaggcgaagaaacccgaacctcatggttcaaccctttataccaagacatccctcggggacttgagggctcgtattggtttcagcgtgatagtcacccatcgagttcccacccgagagaaagagcaaacgatatccccgagggtttcttcacattgtgctaggggttctatttcttcatttggtttctgatcccgaggcaaatacttgagtacgtgaccacgtacaagatcattctttcccaattgaccactcgcgccctgaggcacctcgttgggattttggtacgcagttacgagacagatacgggtgactagcgagtaagtttgcaaaacaagaccgagctaaacaatgaagtagcttgagagagtaaggctgcgaaactagtcaatcattcgttttgtccccgaggtgaccatcgatcttcattgtttggctcggtctcgttctcggggtggaaacaaatctttcacaaaacctaataaaagagatgtatgtttttttttcctttccatcgaccttaacccgaaaaaaacgccaagctaaagagtaaaccccaaactctatttttctttccgttgacctaaatctctcgcggtctcgccggtgattcctctaacgtatctaaatcgtcgccatcggcgattcctccaccgtctctatgttcccgtcgtcgttcttcctcctagaagcttcatattagttcctttcactacttttagctatgatttatgtatagtttttagagtcttttgttatttgtaaagtcttttctagtctttttaggtctttacaatgttgggatgcatttgaagattatggaacattcttgagcaaaacagacaacttaagctgccgcagtaatccggagacgaaaattaacataggtgtcgatcgacacaacccctggtgtcgagcgacaccaatacctgacggtaattgaattgcacaagttattgatgttttgcagatttttaaattcggtacagaactttcccttatttataaagaaggcccatcacgttttagaaacttatatattgatttttatggtcattgtttagaccttactattattctctattctgtactttggggcaaaaccctatggagactccctttagtgaagattcttctaaactcttttctctttttaatttcatcattgatttcttattcaatcatgttttgttcttctatgatcatgcttcagtagttctcttgttgggtttagggattctcattagggatttggatgaattagcagatcaaaaaccctgttaggataatatatttagaattcttcatcttagattgttcttaaggttagttttagagtaactaactagaacttgattttaggataataggtatacccaccataggtatttattactagaactatctaagatgagcctagtatttagatgcgtgctagcgtccattagttaggtgaacttatcaaacctgattataatgcttgcttagttctaggaatttacaagagagttggaatcaatactattaagcatagtgagtagcacggcacaccaccagttactttatattagtgacttgtgttcaagaatggttcgataatattcataatttactgctaaatttactattctgatatctcctgagaatttctctaaacctgacatcttaatcatctgaatctaaagccaacttttaattgctttcttgtcttttacttttataatattttctgtttagctttattcgaaactgttagtctattgtgtgatccgagaactttgtggaattcaatccctaagtgctataacaacctctttatttgagagaatagtcattagggtaatttgactcatatcaaatttggcgccgttgccgaagttctcttcgatttaccaatagattaggtgtagaatttaggctaagcttttcttttcttttgttacttgcgtgttttttttcttttttttcttgtgtttcaggagtttaagaaattcaaacgcaactcacgatgttgatagtagtacctgatgctgttggagtgttacgcgacagagctggtcaggcatacaatgaagagggtcagaaaatagataacagggaaacctgataccagaaatcgccgatggtgtcgatcgacgacaacttggaaagcaataaaggttacttttctcaacaacttttataatgatgcaaggtccgaggagctgataatgaagatctctaccttctctcaagaagcagctaaagcatttaaagccgcttggatcagattcaaaggatattagagagattgcccgcatcattgtttcactgaggttcagttgttaggtatcttccttagaggagttgattgaaagctagtaatgggaatttcatgtcaagatatccagaggatgcaacaatgttgattgaaagcttatcttctagtattagtaccaacagcgttgacattacaaggaaaacgcaagttcaatatgttgcacatgttgacagttttgccattttagagaagatggatcaacatggatatatgagctacaatcagcaatctacacatcagaaaccggttcagcaatctacaagcttcactccgacttatgcttcttcaacccaagcccactgataataggtttttagtcaattgtcctaaaacaccaatcatgtcgttgtagtattttaggtgtcaatccaaatgggtgtgatgcaaacagatgagatgtgatcagaagtcactaagtcaagccaagcaataacagttttggggtttctaacagtcctagtgaacatgcagaaaacagaaacaataacagaattagtaaaatcactcgaccacaacaggctgatgccagaagtaggatgtggccgagtaacaggcaggatatgaaacagatatactcgactgcacagtctgttgccagacactgggtgtggtcgagtaagttgatcgagtgattgcaaaaacaaagaaacaagcaatgagaacgattaagtgataacgataaaacagagaaatcagatagacgagaaattcctaaggatggggtaatcgaatagagtggtatcctagcctatccgaatgattaacaagcgcaatcaagctatccctagacaacaggttcaacaacagatcaattcactcccgtgatagaaatcctcaagcaaagctagcccagactaattcctattaacgaaatctaactatgcaggcaataagaacagactgataatctcaataaatgctctaaacggccaatcccttgggatagagacaaatatctcaggaactagtggatcaagcattccatcgaacaccttttgggtgcgggaatgcttgggatcgaattccagttgatcaaaaataaataagcattaaacacaactagtcctgaagggattcaatcaattctaaaatttaaccattctacagactatggattccccaactactctatcccatccctaagaattctaagtcactactaagacaacatgctcaaagacataaacgcaggtaactgataatattgcataagtaaagagataaagagtagagaaacaagatgacagatgaaatcaaatgcggaatctgaataacttggaaaaatctcgaattacaggttacagaagcaaaagcggcgcagaagagtaaaacagaaaataaaactgaagcaaaaactcaatatcgactagatgtcccaagacagaaccctaagacatctgtttatacaaaacgaaataaaataatagtagacggaccaataacctaatcgcccggcccatagaatgataatgggccgagatgggcttcgtgatccgatggaggtccaggtcgatcgacaccagccaacgcaaacactgcagaacccgatagtgtcgaccgacaccaacatggtgtcgatcgacaccaacccagtacagccctgcgaattctcctaaacccgatttcatctgtctcaaaggtaaccaaacccaaggttccttttcccaagagtcctaggaagtccaaacaggagctagatgatgctagatgcaaagctatgatggataagttgatggtaaagatgcaacttatagatgctgtgaagtcttctcctatgatcagacaatatgtgaagaggatggttactaaagatttgcttactaagaaagctgtgatgaagatatctacacaggttagcgacattattcagaacaagattccaaagaaacttccagatctaggtagctttgttctcaattgtggtatccttaacgagagttttgagcgatgcttgtgcgatcttggttctagtgtcaacttgatgccacgttcagttgcgtttcggcttggtttgacaaatttagagcctacgcaaatcactcttgttcttgctgatcgactgtccgtagacccgatggtatcctatatgatgtccctatacaagtcggttctagctacattcctacaaattatgtggttttatcttatgagaaagaacctaaagatcctctaatcttgggaaggcctttcttagccacaactggtgccctaattgatgtaaggaagggcagaataggcttgaatgtaggtgatcttacaatacagtttgacatgaattaggtggttaagaagcctaccatcgatgggcagactttctacgtggatactatctcttctctggctgacgaatttctgaagatgacacatgccgatcctttgaagcatgctctaattccttcaatagacaaagttcccgacgggtatggtaagctactggatagaactgagcatgtaatgcaattagttgctcaggaggagttaattggcacatctacaaacgcagcaacagttggcgactggagcccaaaaaaagctcctaaagttgatctaaaatcacttcctccagggctaaggtacgcatttcttggtgacaattctatttaccctgtcattgttaatgattctttaaacaaggcaaagctcactttattgataagcaagctgcgcaagtatcgcaaagctcttggctattctcttgatgatattgcaggtatctctctggacttatgtatgcataggattcacctcaaggatgagtctaagccctcagttgagcatcaaagagactaaacccgaatctgaaggatgttgttaagaaggagatcataaaactgttggaagctgggatcatctatctaattttagatagtgattgggttagtctagtgcatgtggttcctaagaaaggaggtgttatagtggttaagaattacaagaatgagctgattcctatggtacttgatggatactatgggttctaaaatccacactagagatttgtaattgagattatgagaaaggagggctataacttcactgaaaccttgagagttatattgctaagaacgaatggactttttgtattgattatgacaaagcttttataatgtgaaatgagattacaagtgtaaaagtatgtgtgtgaatgtaagctgaattgaatgtgtcttccaagtcgtccttgctcccttatataggtctacgcacgtggtagctccgtccgggatctgcggagatcctcctagatattcggcaggtcagttccgagatattaggtccactccgcgaatatctcctcatcagttcttaagttgttattcgcttatctcccttcatcaggtgaccgggcttatccggcccaagtacctattcgcgtatgtgggctcatcagctgcgtaggtcctctacttggtgggcttggtgggctttgtgggctggcttggtatttttgcaggtggattcctggaggggaatccagctccaacagatactcaggattctttcagataccaatccatcaagatgatcaggagaagaccacattcacgtgtccctatggtactttcgcctatcgtagaatgccgtttggtctttgtaatgctcttgtgacatttcagagatctatgatgtcgatcttcacagacatgattgaggatcatggaagttttatggatgacttttctgtttatgggtcttcatttgaagcatgcttggggaaccgcaaagttctagctagatgtgaagagaagaattagctttttaattgggagaaatgtcatttcatggttcaggaaggtatagttcttggtcacaaagtttcaggtgttggtattgaggttgataaagccaagataaaggttatgaaaagtttacaggcaccagatagcgtgaaatctgtgaggagttttcttggacatgttggattttacaggaggttcgtcaaggatttcagtaagattgccaggccactaacaactttgcttgctaaggatgtgaagtttgacttcaattctgagtgtcatgctgcttttaatgagattaagaatgctttagtgagtgctccaatagttcaagctccggactagaatttaccttttgagataatgtgtgatgcgagtgattttgcagttggagctgttttaggacaggggaaagacatcaacttcatgttattaactatacaagtagaacacttgatgatgcacaacagaattatgcgacaacagagaaagaattgttagctgtggtttttggttttgagaagttttacccttatctggttgggtccaaggtaattgtgcatacagatcattcagcactcaagtaccttatgcagaaaaaggatgctaagccaagattactacgattgattcttcttcttcaagagtttgacatcagtaagggataagaaatggattgagaatggagttgctgatcatttgtcaaggatcaaggttgaagatgacgttcccatcaattatttttctacctgaagaaagtatttacttggttgagacaagtttgcaggaaaatcttagcagtgtcaattcacgcgcagatgagagctgcaaagaatcagtgtcgatcgacaccacaccccctgtcgttcgacaccatcgcgcttcacagacagatggttctgcacctccttccccgcccacatctatttcagttccctgtgataggtacttctccatctcttctcctacttatccttcggttacttctttagaatctttgaagtgtgcttcactggtaaacgagcatcgggtttctcgagagcttgtttcctctgctgattttgcaggtaacaatgggagtatcgatcgacaccaccaccagtgtcgatcgacaccagatgctgcacatagccgatctgtttacacaccgcattggaaggcgagattgcagcataagtcccatgttcctccatccaagtcctgaactccgccaagttaagctattgactataaacaagcgcttagtaggaggcaacccactggtatggttttctttttcttttattttttgtttttcttttatttttctcgcttactccggatttgaatgccactggggacagtgacgttgaagtctgagggaggcagttactaagtgcatttttctgttagagtctttttcttatttatgagtcgttttattgagtcaaaacttttgttcaaaattatgatctctccttcgagtttattgcctggattgcttatttactccatattcaaatcaattcgactaatggaaaatccagaaggccaaccaacaaacttaaggacattcgttccgaacataatccacaaaggctggagctaatctcactgctcttccttttacctcatcaaaacggttagagttcgtaggacttgactaagaaagtatttctctcccttgataaaaaatatgtatactaatgagagattgaaaggattttcagataatgtataggggtaagaatgtttcctattatcccattattatacattgtttgaaatgatcaattacaaaggttggaaaaatgccgagggtgtcgatccagtatgcgagttcccctttgtttactctctaaaaagaataagtttaggggagagaaaaagtaccggaaataaaaagaaaatgagtggtcgaattgttatggtatactacatgaataagtctagaaggtttattaaacgttaccctgattgatgagaaaccaacgatgaaagcctaatgtattaacgactcaacagagtttgcggaccaagtcatgatcccaacgatcacctaaccatataaggaagttgctctgtttttgatacaatctgtatacgattgatacgattgtgattatgcattgattgtaatttaggattttctatgatctcttttgtagcctataaaagacatgtaatatgcatcaaagtaaatacaagaaactgtttacagtttctaaatctttatgatatcaaagcgacaaagtttttcttcaaaaattctttgtgatctctgaaacttcgaatgacaaacccgaaccagactgaagctccggctgcgactgtggaggtgagaagaaccatctctccttacgagttgacctctgccgacaatcccggcgcggtgatatcacaccctctctagaagggagttaattacgacgaatgggtttgcgggatgaaaacggcgttgtcattacgcaagaaattcggattcctcgacggctcaatcccaaaaccggctgatggatcacttgacttggaagattggtggacgattcaagcacttctcgtgtcttggataaagatgactatagatccatcgatgcgttcaacaatctctcacaagatgtggcaaaggatctatgggatcacttgaagaaacgatttggggtgatgaatggggctcggattcaacaaatccatgctggattagcttgttgcaaacagagaggtgcagcaatcgaagcgtactatgggaagctgacccaaatgtgggatagtcttgcgagttaccgaccaatacgagcgtgtaagtatggtttgtgtacgtgtgatcttgcgacggcacaagaagcggatcttgaagaagacaaggtgcatcaatttctttgtggacttgatgatcagtttcggacagttcgttcaacccttgttgctcgtgttcatgtgcagccattagaggaagtctacaacattttgcgacaagaagaggatcttcgcataaatgttgaggagaagcctacagatgtgacatccttttcagttcaaacctgacctcgtttcaaacttgacgacaaggaaaaaggagttatgtgcaacttttttaatcgcattggccatagcccagacaagtgttatgcggtgtttggctatccaaaatggtggggtgataggccaaaaggcagaactttgcaaggacgaggtcatggcggtactaacggaggagctagaagaggttgtgggagcacctcctacaccaatgcagtccaagtcaatccactgacaagctatgagcaagctaactacgttgtgacagaaaaggacagtgacgaagtaacgggatttatcgatttgcagtggaaagcaattaagaatcttctcaacaatgggaagactaacgaaactgaaaaaactgacgggtaagtcttctttgcctttaaggatagtggatactggtgcatcgtatcacttgatgggtcacttagacattctagaaagtgttaaggaaatggaacaaatcagtattgtattggtcgatggaagagaaaaagtggcagttaaggaaagatcagttaggataggaccttgtttgatactccgctcagtttattatgttgagaatttccacacagatttgatttctctttgccaagtgatggatgagaacaattgcgtagggcagttagctgatcgttttcttgtggttcaggaccgcactacgaggatggtgtttggagttagtagacgtacaggagggactttccgctttagaagtatggagtcagcagcatttgtggaagtaagagatgataaatcttttgagctttggcataagaggatgggatatcattcaaacaaagtagttggtcttctccctgttgtttcaaatgttgtttctgatattttgaataaagcgtgtgatgtttgtctccgcgctaagcaaacaagattatcttttccatttagtgagaataaaacgaaagggatttttgatctattgtgatttatggggaccttatagaactccaactcattcgggtgctcgttacttcttaaccattgtagacgattactctcgtggagtatggctctatttgatgtctgaaaaatctgaagcttctaatcatctcaagaatttcttggccatgactactggtcagttcgatactccagtaaccttggagtacttattccaggttatttaaaaggccaaagtcgggtctttctttcgtgttataagaagcgataacggatcagaatttctttgtctaagtgaattcttcaaacaacaaggcatagttcatgaaacgtcttttgttggcactcctcaacagaacggaagagtggagagaaaacaccagcatatactcaatgttgctagagcgcttggtttgaagccaatttaccgatagcgttttggggcgaatgtgttctcactgcggcttacttaataaatcgaactccaagtatggtgttgaaaggaatgacaccatatgagaggatatataatgagaaaccgaaatacaatcatatgaaggtgtttgggactctctgctatgctcatgatcaatttcataaaggagataagtttgcttttcggagtcgtcgatgcgttttcatcggatacccttatggaaaaaaggggtggaggttatatgacttggaaaaatatcaattctttgtttcaatagatgtggtattttatgaaaatgaatttccattcaagtctgaggtagaagaagaaattgcagaagaagaacttgaagttctaaatttacagtctctgtttgtcgaaaatgaagaagaaaatggacgtacaagctcaattcgtgaggatggcccattaacaccacaatcgactattgggcctacaccaagcccaactgggttattgaaaacccaatttctgaacacgctccttcacttcaaaacgtcatcatcgagggaagtcaaagaactgaaaatcaaaatcgctccactatgattccgacgccaactccggcgattgttccaatcatgtcatcgacgacgaatctgcaggtccaagaagaacaattgggtcgcggaaaaaggcagaaaactcagtcagtgaagttgaaagaatttgtggtaaacacgggaattctgaaatcgaagacggcttcaacgtctgattctacatcgagtcatccaattgcaaatttcatttcttgtgagcgtttctctactcaacatcaagcatatttggctgcaataacttcgggcgtataaccaaagtcatttaaacaagcaatgaaagatgagaaatggaaaagtgctatgtcttcagaaattgatgctcaagaacgaaaccactcatggacgatagaagatttgccacaaggaaagcaagcaataggcagtaaatgggtttacaagctcaaatacaaattagacggtacattggaacgacataaagcgaggttagttgctctcggtaacaaacaaattgaaggtgtagactacggtgaaactttcgcaccagttgccaagatgggaactgtacggttggttttggatacaactgtgaaaaatgtgaataaaagaagaagagggttttcttactgaataatacttttcattaacactctcccaaactcacgatgaatacaaagagcttatacttatactacaaaaagaaccttctggatccttatttgcagtcaaggatctggttacacttgtcaatcatctagccactctcttcttctgatgtgataggactgaaacggttacatagtacgatggtcggagagtcagctggttgactctgcttcttctgcaaattctgcaaactctgttttgtctgaccgtgatgttgagaggaactcttgacttgggcattgttttgttgggcttgtgattgggctgactgggcttgtgtcttgtcacttacaaaaaatagaagggatgttcaccaaatagacgtctacaatgcgtttctacatggtgatttagaggaagaaatatatatgagactgccacccggctttcaagcttctgattcttttaaggtatgtagactttgcaagtcaatgtatgggttaaaacagagtccaagatgctggtttgcgaaactgtcaacaagcttacaagagtatggcttcgaacaaaataagttggattattcactgtttactctcgacaaaaatgatcgcatattcgtgtattggtgtatgttgacgatttgataatcagttctccgacggtcatggatgacttcaagtcctatctttcatcgtgcttccatatgagtgatataggacttttgaaatattttttgggtattgaagtggctcggaactctacgggtatgtatctctgtcaaaggaaatatgctttggatattgtctccgacacaggcttgttaggatctaaacccgtagctttccccctggaaactaatcaccaactaggcctgtccaagtcgccactcttacaagacccagaaccctatagacgactcattggaaggttgatttatctcgcagtaacatgaccggatttggcgtactgcgttcatcttttggctcaatttatgcagcaaccaaaacaagatcattggactacaactttgcgagttgttaggtacttgaaaaacaatcttgggcaaggtattctgttgagagctgagacaccattttgttttactggttggtgtgatagtgactatgcgagttgtcctttaacgagaaagtcagtcactggttattttattcagcttggaggatcgccaatctcatgcaaaacaaaaaaaacaaaagacactgagtaggtcttctacagaagtagaatacagagcgatggcattcttaacacaagagttgattttggcttaaaaggattcttcaatcgcttggagtaaagcactatcagtcaatgtctgtttggtgtgatagtaaggcaacaattcatacagcgacaaatctagtctttcaggaacgcaccaagcacgtcgaagttgattgtcattttgtacgcgacgaggtactatccaaaaatatacgcctgttacatgtacaaagtcacaaataacttgcagatatctttacaaagccgttggggaagaaggaatttgatcggttatgtatcaagttgggcatacaagatttgcacgctccaacttgcgggaaggtattaacgactcaacggagtttgcggaccatgtcatgatcccgacgatcacgtaaccatataaggaagttgctctgtttttgatacaatctgtatacgattgatacgattgtgattatgcattgattgtaatttaggaatttctatgatctcttctgtagcctataaaagacatgtaatatgcatcaaagtaaatacaagaaacagtttacagtttctaaatctttataatggatatagttgagtgctttggtatggaatctaggatgttgtgtgggctagcggagaattacatagtggtcaggatttggctagaactatttagtgcatagaattggtttgtatgatcaggataataagctagagagattcggagttcctgtgttttcaaacctcttccacgggtttggcttttgtgttttgcttgagggcaagcaaaaactaagtctgggggagttgatatacctcgattttcaatgcttttagctatgaattaggtatagtttttagagtcttttgttatttgtagagtcttttctagtctttttcaggtctttaaatgtttgggatgcatttggagattatggagcattctggtgcaaatcagacaacttaagttgcagcagcaatccgaagacaaaaattgacgtaggtgtcgatcgacacaacccctgttgtcgagcgacaccaatacctgacggcaagtcaatcgcgcaacttattgatgtttccaaaatcggcccagaactttcccttatttctaagaaggcccatcacgttttaggaacttatatattgatttttatggtcattgtttagatctaactattattctctattatgtactttggggcaaaatcctatggagactccctttagagaagattcttctaaactcttttctcttcttaatttcatcattgacttcttattcaatcatgttttgttttttctataatcatgcttgagtagttctcttgtttggttaagggattctcattagggatttggttgaattagtaaatcaaaaaccctgttaggataatatatttagaattcttcatgattgttcttaatgttagttttagagtaactaactagaacttgattttaggataataggtatacccaccataggtatctattactggaactatcttagatgagcctagtatttagatgcgtgctagcgtccattacttaggtgaacttatcaaacctgattataatgcttgcttagttctagggatttagaagagagttggaatcaatactattaagcatagtgagtagcacggcacacctccggttactttatattagtgatttgtgttctagaatggatcaataatattcctaatttactgctaaatctactattctgatatctctagagaatttccctaaacccgacatcttaatcatctgaatctaaaacaaacttttaattgatttcttgtcttttatttttataatattttatgtttagctttattcgaaactgttagtctattgtgtgatccgagaactttgtgaaatccgatccctaaatgctataacaatctctttatttgagagagtagtcattaggataatttgactcatatcagcattccatcgcttgattgaactttcaacatgttaatctatttgttctctttatttcttctaatttgcaagtctcaatttcaatttgcaagtaaattggtaagttattagaaagtaaatcttattgttttcaaaatttctaacgttttacaagtctcgataagtatttgcatgtagatttcatgggttcttttaggcctgggctcctgttgttgatttccctgaagcttctctgatgtcaaacttcatcttgatgcctttttcaaggttcagattaatttttccattcctgacatccatgactgctccagctgaagctaggaatggtctgcctaggatcaggggatccttgccttcttcatctacgtccaataccacaaaatctgtaggtatctcaacatttccaatcttaacaggcagattctctatgagaccgtgaggatgtgcaacagaaccatcagctaagaataaagctaagttgcagaacttgaattctatgatccctagccttttagctgtagagagaggcataaggctaacagatgctcccaaatcacaaaggcacctattgaatgtcaatggtcctaaagagcatggaagagtgaatgaaccgggatcatcaagcttttcttggatgactttcttcttgtatatttcttgagtgctggaactgctaatcatcttttgattctgctctttcttgagtttttcaattttgaatctttttccggaatgttgagtattcagcaaaggtgtgtgctctatagtctagatggattgctgagtggcaggtgcagcaatttgagttgaatcccccccttcttgaatcatactgtcctcagtattgagagtcagatgacttggtggagactcatcttcttggtggatggtgatagcattagcagtagcatagtccttaggattctggactgctttccctggaagttgttgaggatgcttcggagcagaggttgatgcaaattgactctccacatacttgatttttgagttcaaagcttcaaacttgacattcagatcgttgtatgaacaatcgatcttgttgtgtaattcagctatcttcttgtcaaaagccatagcgccagtagcttacccttggatgatctgttgaatgagttgcttaatttcaggatcttgagctgctggggcttgttgtggttgttgagtgaaccctggtgttggattctgctattggtagcctccattgaactgttgtttagggacataaccttggttgtactgaacaaaaggcttggactgattctgttgtggtggatacacttgatcttgggggttagctacattattgcttctgtaggagaggtttgggttgggcttgtagttgttgaagcccttgttgaaccctccttggttctgaatgtagcacagctcttcagtttgatcattcccccttcttgcatttggaagtgctcttcatcagtgatgaagtgtacctgcttctgctgagccagcaacaacttgtctaacttttcattcacagccttgatatccttgctctgtttaacctcattacctccagttcctctcattgagcgatcatagtcttcattgtagcacccatcagattgtgctagatttttgaccaactcccagcattcagctacatctttgttcaagaaatttctattggaggcggtatcaagcagcattctgatctttggtaaagctcctctgtagagtgtgctcagtaatgaagcctttctgaaaccgtgatgggggcactgagtggtgtagcttttaaacctctcccaagcttcacaaaaagtttcattgtttttctggttgaaaccggagatctcgttcctcaatctagctgtgcaagcgttagagaagaacttggcaagaaaagctttcttacaatcgtcccatgaggtgatggagtctagggtagagtcttctcctagtggtgtgccttgtctcccaaagagaagggaaatagcctgagcttaaacatatcttcagtgacaccattgatcttggtaaggccacaaagtctatcaaagctgtcaagatggtccaggggatcttccataggtaaaccatgaaacttgtttccttggatcatggagatgagaccactcttgatctcaaagttgttgttctgaactggtggaggcactatcccttgtctttggtgatgattccttgcggcatcaccaacaccaatgtttcttggttgatcaacattaggtgggtcttgaacataaattggtttgttctgttgatccatagctgctggtctgttctgatcacaggctgcctttgctttggtttctgataactcacgagctattttgtcaattctgtctctgaatggtaataggtgtgcagaaccttcgaatcgagtttgcatgcacaaagattagtacctataccacaaaaacaagcagacgaaaatatgagttagtaacttgataaatgtaaaagaacttgatcttaaaagtttctgatatcttgaatgtaacaatgcaacaatgaattgacaacgacgccaaattgataaggaggtttttcaggtctgctgagattcagttcaattcccctaaaacacaaataagtcgatgcagttatagggggtgtcaatccagtccactgtaatgatggtgtaaagaaactactaagtcaagccagattataatgatagtgggtttctagtaacaatcctaggtcaggattcaaacaagtaaaaataagaacttaagagccctattcgatcattgggtcgagtagaaccaacaagtgacaaaattaagaaacctaaatgcaatcaacaggggatataaataggggatacaaataacaggtaaagaaaagtgcaatcaacaggggatacaaataaatctaatagaagttctaaggatggattcattgataagggcaactctaggattcaccaattggctaataggcgaaaggtagatacccatgacgatagattcaaaaaccgcgtcaatccactctcgtgacagagacccgcataactctaccacttcctaatttcaactctcgttgatgaaacatagcagagcagggtttaagaaacaatctaccaaagccaataggtaaacaagccaatcccttggtcgagtctacaaatctccagaatttgtaggtcagacatccatttgaacgtcttttggacgctggacgtctatgatcgaatctccacattagccagcaaaaaccgcataggggccaagcgaatccagaagggtataaacctaaacactaaccacctaactaacctagagattaccctaatctaatccatcttcaagaaccctaatcactactcaagcaacattatcaagaacacaaacccataaattactaaaataataccaaaatgtagatctaaacaagctaaacaactttacttaaacaatcaaatgcaaaaacgaaatagattaagagtaattaaggtttcaagattcataaacacaaagaaaaactgaaagataaagcatagatcctttggacaaatcctaaagtgatctatttatactaaaatgttggaaaccctagattcactagaagacaagagacttgaggcggtttgggcgaatactcgatcttggggatcgagtaaagagggtgctgcaaagtctgcgcctttgtgtctatgctccgagtgatcaattggtcgaatagatgcttcatcctctcctattcgtatgctcagatgtctggttaagtggggaatgaggaggatccgaagacgctttgatagctcaacaagtctggtagagatagttacccttggtcgagtaaatggatcgagtagtggatcgagtagaagaggtgagtagatcaatctactgcttcatctaaggttgccttgatcgagtaggagggtcgagtaaactgcagcctcctctgtggcatcctggatcgagtaaagaggtcgagtaaactgcatcctcctgtatagctgcctgggtcgagtgaatggatcgagtagagtccttttagctccttctgcacctgaaaacataccaaaacatgcaatgcatacgcaagatgatcctagatgcctaagtatgcaaaataagctaaaattgtgcaaaatgatatgatacaatgagcaaatgcaaagctaaatgatgataaacatacacctaaaatgagtaaaatacagtgttatcaactccctcaaacttatcttttgtttgccctcaagcaaacaaaaaatcttaagttgaaggagaggtttgaaggtggggattcaaaactgaagcatgcatataaaacgggtaagctcaatgtcgaggtagctaattctaggttgcaagatgttagccatactcgtcacaatgtaacctaacaacttgccttaatctattcaagcattcacatcaaccaattccctttaacattctttaagcacgaacagtggatcaagcaatgcaatggttatgaactcacttggttttgggcttaggctagaagacaaaaatggtccctctaatggtttggtcgagtaacaggggactctcagagaaaagattgagcttcagtagaatgctaaaggtaaaagccaacggacacatacaagaacagactcccatctaccccatgatatagtacgatagctcagaagatgatcccagtcccatagatgtcctaactttaccatttttctcattctttctctctttttggttcaagttctaaggggttctctttgaaacgatttaaaagtctagcaggtttgattttatactttgacaaacttaaggcttttttctaatcttagcacatagggcgatttacccctttctttgaattacaatgcctaacttctttgaattccaaaccctttactagacttaacacttttgtatcccccttagaactctaaactcttactctttttttttttcttttcttttcattctcactcatattctcattcattccatacacaatctcaatcgcaaatacaagtctccacctagtcctagctaacccaaaaagcgtgggctatgtctacatgaaagactgctcttgtcggctcatacctaacacgttataccaagctcaatcaaaaaagacctcacaatcacacacaaatgatctttggcttgaaataaggctaggctaagggtatgagaaactgctctaaaaatgagagacagctacttggattaacagagggtgatgaaatgaataagatgatccaagtatgtacatggtagccatgagttcacaaacaatgcatagacatgataattgcaatttcagttcaggttctaatagatagggaatggcatcagataagcaagtttcgatcaaagtagtatagtcaagttacaaattcaaagcagggtgcggtcttatttcagagatacaatcggttatgcaacaaagaattaacaacttgagcattgaacttagttcattgaatcaaaacatgcttatcggtttgaaatcatcatcatcccctatgcaaatgagcaatcctaaatgcaaacactctatatacaatcctaaaatgatatggaatctacatgacactctttttttgtgaaataattttctgaaaatttttcaaatttttatagtttttctatgccttaaatgatgcaaaatttgaaataagaaaatagaacacaatgttaaacctgtcttgaagcctcccccaaacttaaattacagagtcccttgtgtaataaaaatctgaaagagaattcaagaccaaaacacaaaacacacaaagaaaaataaaaagatgctatggtatatactatggagaggtggtgttacctcagttttcaagtgaagtagatggagacatagtcatccatactctcttgggtattggcaggggctgaagttgaggcgggagggtgttgctcgttctgtccggtcgagcgtgtgaaagctcgtctctacctactccttggctctctcaactcggagatcacttcccgagggtcaaaagatgaagctcggggttgatcgatcctttcagctctccttgcagctgagctcgttgaaccggtccttcttacttcgggtgttggagatggtggccttggcttgctctggaagtccttgagttgagcagccatactcttgagcgatttcttcattgttctcatgttcttcttgaaacccttcattgtcttgctgtgaaggttcccaagctcttcaagtacaccgagcttcttgtgaacttcagcaaactcatctcctccttggttagcaccttcttcataatgagcttgctcttgttcgctggtcccatgctccggttgatcaatatgttgctcaaactcgatttgctcctcataatcagcttgagtaaattactcatgttgctcatagtcggctggactatattctggtttatcttcctgagctcctccaatgtcgatgttcaaggtagagggagatggcatgaaattgatgttgcgtcttgtcttcaccaaagtctggttctcgcatggtaggggtaaaagagaaggtccaagctccgagtggttgaacttgaagagatagcgatctgccggagttgttttctcaagaaaatccttccccttgagatagtcgaggtcaatgaacttaggcaacatgtcaggggctccaaatttcatacccacggctcctagtattggcgttaagagaccgccaacacaaagactcccgcaaattcccgagcgatggatggttgcagcatactccttgtaactcaataagtgatccaagagaacaacactcaacgaagtgtctgctctatcacccgccatcttcctcccatctcttgtttccctcaaaatgaagaccaaagattggtatatcatgcatagctcctcttcactaacaaatccggtagccttctttagaaagaggatgttggcgatgcattggtggaggtatctaatcacgggattacggattgaagaactcttgctcttggttggtaagaagggcttcagaccgggtattgttttccaaagagatttcagctcttcttgatcatagtcttggcggattccttctccacttgggaacccgaaaatggtatcaagatggcatatatcaagagtatactctacatccctaactttgaaggttatgtaaacaagacctcctctctcttctttctaagaatcatcaacacaaaaatgaaccttgagggttgcaaggagttggcagctctcctctttgtatcccccacattggcagctcatgaatgttgcaaaattgaccaattccatcaagtattccacatcaccacaaataccaagctcttgcatcgtttccttatgagggtacctagttccctcaaacttcaactccttcaaatattgatagtactcgctcgggattggttctctcttcctccttggtcggtttcttctcccaacaggggttggtgtatcatccccgatgatctcaacctcttctttagaaaccgcttcttcaaagggtgcctctccatggtgttcttcttcagcttcaacgaccctctttccccgagctacttcttctctttgcatggtcgagcggcttgagcttcctcgttgaaccaagcttgatctttgagcacgacgagcttggcgaatttggcgttcagtcatgccacacatgtcaaacacctcaacttcttcatgatcaacagaggatcttcttgcccgagacgaactcttccttcttgaatccttggtggtgagtttcaacaaagcaattaaaaacaactctccaagaggtatcaaggggtaagggaatcagtttctttgttgatgaaatttttgagtttgataccgattgaaagcttgaggatgaacttcgaagtgatcgggtaactttggtgaagtattggtgtaggggaacggattcttaaagagtgatagggagcgattttaggggaagagtttggaatgaagattttcaaagctttgtgagggggttgcaaaaacgagatgatgaaagagagagtttcaaggaaggtttgtcgaaatcaatgggtggaggagaatggtgtttggtttctttgggaagggatagaaaagttaattggaaacggtgagggggatgggtaatcgctttgtccattgagtaaaagagtgttgggggagcaagtggggtcacgaagttatgccatggtcttcaaataatgagagctcgagtaaaggatcgagcatcctcttgaagtgcgaaaaatttgatccaacggtggagagcttctcattcttgtttactcgatcaaacggaccaaaataaacttcagaaagtcaatcgatcaaacggcggtgatgctcctctcatttggtcattcaaatcaatatctaaaaatactcctcctcattctactcgatcaacaattgagattttccttgacttgatttgaaattactcgaccgttgactcccttagggtcactaaaacaaacttgaaacacttaaacaaaaacatcaaaaataacaagaaaaatagaaattcatatacatggatagacatgggactttctcacaagtgagcttgttttaagtcattaagcttgactcttacagagcttagtcagaaaaaatgttgaagagaggaatatagaagtcctcatcttctgtggttgaatttttagtgcttgaatcatactctgcatcctctcttgaaatatggtaggatgagtactcatttgatttttcttcaaagcaagcttctttctgatcagtagagtagtcttcttcttctcaaccaggctcctttgaccaatcctcaagttcaaaactggggtagcctttaaccattttttgaagttcctagattgcatggttcagtccttccatcttgtaagttagctccccaatggtatcctcttgagctttgtattctatcctgagttctagaagttcttcagtaacagaatcaagtgtcaagtgttcttcttcaacagaggggttggtgggctgtttaggcactcctggagaataagtcagaataggactttcctcctcactcaacaacttgctctctaggcttctttcctctaagtgaactcctttctgatcttctggtgcaaaccattatgttgtgaaattttcgtcctccttgatagttagtgcagtttccatcttctctcggttaataccatttgaaaactttttaactcttttttcaaacatccataattgatctttcagcttcatcactcttgaagataatccttctatgactctgctttgccatttaaatttttttctcatctcataccagtcatcttctgtaggatcttcagtctgagatcgcctttctgttgctctcttcttgtggtcaaaagtcctctttagcttgctgagttgagaagtatagttgacttttggtgaggttctagcttttgcttctttatcaatatccatgtcctgaatcccaaaattctgaactcctgttgttgatttcccagaagcttctctgatgtcaaacttcatcttgatgcctttttcaaggttcagattaatttttccattcctgacatccatgactgctccagctgaagctaggaatggtctgcctaggatcaggggattcttgccttcttcatctacgtccaataccacaaaatctgtaggtatctcaacatttccaatcttaacaggcagattctctatgagaccgtgaggatgtgcaacagaaccatcagctaagaataaagctaagttgcagaacttgaattctatgatccctagccttttagctgtagagagaggcataaggctaacagatgctcccaaatcacaaaggcacctattgaatgtcaatggtcctaaagagcatggaagagtgaatgaaccgggatcatcaagcttttcttggatgactttcttcttgtatatttcttgagtgctggaactgctaatcatcttttgattctgctctttcttgagtttttcaattttgaatctttttccggaatgttgagtattcagcaaaggtgtgtgctctatagtctagatggattgctgagtggcaggtgcagcaatttgagttgaatcccccccttcttgaatcatactgtcctcagtattgagagtctgatgacttggtggagactcatcttcttggtggatggtgatagcatttgctgtagcatagtccttaggattctggactgctttccctggaagttgttgaggatgcttcggagcagaggttgatgcaaattgactctccacatacttgatttttgagttcaaagcttcaaacttgacattcagatcgttgtatgaacaatcgatcttgttgtgtaattcagctatcttcttgtcaaaagccatagcgccagtagcttacccttggatgatctgttgaatgagttgcttaatttcaggatcttgagctgctggggcttgttgtggttgttgagtgaaccctggtgttggattctgctattggtagcatccattgaactgttgtttagggacataacctgggttgtactgaacaaaaggcttggactgattatgttgtggtggatacacttgatcttgggggttagctacattagtgcttttgtaggagaggtttgggttgggcttgtagttgttgtagcccttgttgaaccctccttggttctgaatgtagcacagctcttcagtttgatcattccccccttcttgcatttggaagtgctcttcatcagtgatgtagtgtatctgcttctgctgagccagcaacagcttgtctaacttttcattcacagccttgatatccttgctctgtttatcctcattacctccagttcctctcattgagcgatcatagtcttcattgtagcacccatcagattgtgctagatttttgaccaactcccagccttcagctacatctttgttcaagaaatttccattggaggcggtatcaagcagcattctgatctttggtaaagctcctctgtagagtgtgctcagtaatgaagcctttctgaaaccgtgatgggggcactgagtggtgtagcttttaaacctctcccaagcttcacaaaaagtttcattgtttttctggttgaaaccggagatctcgttcctcaatctagctgtgcgagcgttagagaagaacttggcaagaaaagctttcttacaatcgtcccatgaggtgatggagtctgggggtagagtcttctccctgtggtgtgccttgcctcccaaagagaagggaaatagcctgagcttaaacatatcttcagtgacaccattgatcttggtaaggccacaaagcctatcaaaactgtcaagatggtccaggggatcttccataggtaaaccatgaaacttgtttccttggatcatggagatgagaccactcttgatctcaaagttgttggtctgaactggtggaggcactatctcttgtctttggtgatgattccttggagtatcaccagcaccaatgtttcttggttgataaacattaggtgggtcttgaacatcaactggtctgttctgttgatccatagcagctggtctgttctgatcacaggctgcctttgctttggtttctggtaactccgagatattttgtcaattctgtctctgaatggttataggtgtgcaaaaccttcggatcgagtttgcatgcacaaagattagtacctataccacaaaaacaagcagacgaaaatatgagttagtaacttgataaatgtaaaagaacttgatcttaaaagtttttgatatcttgatgtaacaatgcaacaatgaattggcaacgacgccaaattgataagcaggtttttcaggtctgcttatgttgtatgtgtgtgagattcagttcaatgctcctaaaacataaacatgtcgatgtagttataaggggtgtcaatccagtccactgtattgctagcaatcaagatgtgtacagaaactactaagtcaagccagattataatgatggtgggtttttagtaacaatcctatgtgaggattcaaacaagtaaaaataagaacttaaaagccctactcgatcattgggtcgagtagaaccaacaggtgacaaaattaagaaacctaaatgcaatcaacaggggatataaataggggattcaaataacaggtaaataaaagtgcaatcaacaagggatacaaataaatctaatagaagttctaaggatggattcattgataagggcaactctaggtttcaccaattggctaataggcgaaaggtagatacccatgacgatagattcaaaaaccggatcaatccactctcgtgacagagacccccataactctaccacttcctatctcaactctcgttgataaaacatagcagagcagggtttaagaaacaatataccaaagccaataggtagacaagccaatcccttggtcgagtctacaaatctctggaattcgtaggtcagacatccatttgaacgtcttttggacgttggacgtctatgatcgaatctccacattagtcagcaaaaaccgcataggggccaagcgaatccagaagggtataaacctaaagactaaccacctaactaacctagagattaccctaatctaatccatactcaagaaccctaatcaccactcaagcaacattatcaagaacacaaacccagaaattacaaaaatcataccaaaatgtagatctaaacaagctaaacaactttacttaaacaatcaaatgcaaacacgaaatagattaagagtaattaaggttttaagattcataaacacaaagaaaaactgaaagataaagcatagatcctttggacaaatcccaaagtgatctatttatactaaaatgttggaaaccctagattcactagaagacaagagacttgaggcggtttggacgaatactcgatcttggggatcgagtaaagagggtgctgcaaagtctgcgcctttgtttctatgctccgagtgatcaattggtcgagtagatgcttcatcctctcctatctgtatgctcagatgtctggttaagtggggaatgaggaggatgcgaagacgctttgatagctcaacaagtcttgtagagatggtcacccttggtcgagtaaatggatcgagtaggagagacgagtagatcaatctgctgcttcatctgaggttgccttgatcgagtaggagggtcgagtaaactgcagccttctctgtggcatccttgatcgagtaaagaggtcgtcgagtaaactgcatcctcctctatagttgcctgggtcgagtgaatggatcgagtagagtcctttttagctccttctgcacctgaaaacacaccaaaacatgcaatgcatatgcaagatgatcctagatgcctaagtatgcaaaataagctaaaatgttgcaaaataatatgatacaatgagcaaatgcaaaggtaaatgatgataaacatacacacctaaaatgagtaaaatacagtgttattagtgatcaagtgctggatcttttatttcatctggccaagtataaaacagctcgtttacatcatccttcataaccattttatgcacacgcagttacaacacaagagattataaaacccatcaatatgttcaaagtcagtcatcaataagtataactcagacattgcttaacaataattcaaccatcactaaaccacaactaagtcataactaaacaatataagacaaacatcatataagaataacccaaacatcaataataataactcagccatcaaaattaataactcagtcatcagtaactatcataacagagccaaaaccttacctcactaccaagcgttgtgatatcttcaccaatgatcgattttattgttgcgcgggaacggttgcttccccatctaagcaacgaaatctcattctcattgactacgttcccaaatcgctctccaatggtgttgattgaatcataggcccaagcctgtaacacgaaagtcataccactgatggtgtacgacttgccaacaggcatcagcaactttatagaatcaacaagggcttcaaatgcttaccgaccccatggatatcttcatggattcgttgtcaaaaactcttttgacactctcaaatggtatcctagagttaggatgcaagccataaagtcgaatggctagaagagtcaataacccaaaccatctacgcttctcagtaggccatgctctgcacactactaagcctcgcctaagttcatctaacttaggaccttcaccggttggcacagtcaattccataagaacgttatgtaatccgcttcaggttcaaacggttctgtaggcaatggatctgtgtttagccccgtgatatgaccaaattcattaaggccaaacctgataggttgaccacccactagacaccaaatctccttcttcagtattccccttctagggtaaagtcttggagggtaattccttgcttggtcttcagacatctgataaaccataaaccagccgtaagcataaataaactcagccacaacataaaataaactcagccacatcacagaaactcagccaaaacataaaccaaactcagcgagagcataagagaaacttaaccaaaatataaaacagaaactcagccacagatgtaaggttaaaccataactcagagaaaacataaaacaaactcaaccacaacatgtaacaaactcagagacagatgcattgataaatcataaatcagtcaacaaacaaacagtaaatcagccatcgaatcaaacagatctaacaaatctgccaccatatgtcaatcaacgacggcgaaaagaagtcgaaataagtatcgttaaaaaccatcaataacttcgcgatagtttttggaaaacggttaaaagtcgcgggaatcacttgctattgaacttagatgtcggaatcttgtcggaaaattcaaaatacagttaggatatagaattaccgacactttgagaagttctgttcaaatgcgacttgatagggatgtgactttactggatcagaaatgcgactccgccctaagaattttggccagaacagaagagagaaagagaaaacggcgacgaaattatgtctcagaaatcgttttcccgtcgagagagaaagcgacagattttttcccgctgatgaatagttttttcaggcagaaaccgaaaggtttatgcagttatgtgaaatgacgtggattatatgttatgaatgtttttttgtttttttttattaaaaatgaattaaataatattatttaataattactaataagggtgttaactataattacacaagtagtaaaaacatatagaaaaaaggtatatgatattctaggaataaacatacaattctatgctatctgagtaatgttttctaaactagttaacaaactaacactatagttttcaaaatatagtaactaaccataaagggtagtatattgaccaaattgactttttttatggtgactggagatggtggtggccggaggcggtgatggtcggaggtgttgatcgtggccgggggtagtggccagaggtggttctggccggaggtggtggtgaccggaggtggtggtggccagaagtggtggtggtcggaggtggttaagaggaatagtgaccggaagtggtggtgaccggaggtggttatgaggagtagtgaccggaagtggtggtggccggaagaggtggtggccggaagtggtggtggccggaagaggtggtggccggaggtggtggtggtagtgatggtttttaagaaagataaaaatgcattcatataaacttttttttgttagttacctaatttataaatttttatatgttatatttctaaatttccccaatataaatgcataatttcaaatgataaaagaaaaacaaaattatccaaaaaaagaaaaagatttgctgacgtaaatgttttgaccatatagctaccgttttaacgaccacatatatttgtaacaacattttgctacttatcagttacaaattagtaacaaaaaacgatttaataaacaatgtagctaatttgttactacccgtagccacttagctacattttgcgtgacaaatgtttttgtaacaaatttgttactacttgtgttaaaattttgttgcaaagttccacaatccaaaatttgtcgccgattttgtaacaacagttgaatagaatattaattaacttcttacgactattacaactagtaaagttgtatctattatcgatgggttatgacattccgttttagtattaaatttgatacgaatttagtatcaaaaactttgttgtaaattttcacaaaacaggttttttaacaaaaatttatgataaaataagattattaatattgtttaatttttgcaacaattcattttgtaccaactagaagcaaagtggagactcacattatgtttcgtaccaattatgagaacttataactgccctgcctcataccaaaggccactcattgtgcggtatcaaattggtctctaaagccacaactattgcgacactataattgcagcaagttgattccaaagcaacttgttatgtgacagtcttattgtagtaaatttatgatggtgtcttatcaatatcccaccaagttgttgtttaattatcagtttcgttttctctcttgttcaaatctttatatatatgcctcattcttatttgttgtatattcattgataagtgtgtattttgccagttttagcatccatttgtcattattttagcatcatatcatcattgttttataccatttctcatcatttgtcatcactttgcatggttaggatagttttgcatgcatgctgcatatttgtgttgatttcaggtgatttggagttgttgacgagctaactggaagaagcggacctgattatgtcaaaccactcgaccccgaggtcgagtagaagcttcatgacctcaatagaccactcgaccccctggtcgagtatgggacttcacaatttcatctcatcactcgaccccctggccgagtaccaccacgattgatactcgatcacttaactcgacccccaggttgagtgtcttcagctccaccacctgaccatcactcgatcacaccactctacctggaagtcgagtatcaccatcaccagcactcgactacatactcgatgtcgagcttcagagtcttctccattccgcactcaactagacactcgagcacaaggaagaaaagaagactccatctattcactcgacatctcactagacaacctgggtcgagtacagttcttaatccatcacaatactgcgtcgttttgagtattagggtttcagaatattttgctataagtagcatgtactttacattttcaagaagaagtttttttctaagttttattccgcagacactgtgttcattacattttgtaatccggatttctctaatctattcagtattcagcattttgttcttgattttgtttactgttgttcatcctgttatcatcctgctgttacattgttgttatcatgttttcatcctgttcaacgtttatgttctctacaatgatgtctaagtagtgaataaatttctgaggatgggttagagtagtgtacaattctcagtatgctaggtagttgagtttgattgatagatcccttctgcattagttggttttaatgcctattgctttctgatcaactagaatttgagcccagacatttccgcacccaaaagttgttcgataaaatgtctgaaccactaattccagagattcgtggctctgtaccaaggtattggttgtagggagcgttttggctttaactcgttgattcgtaatgcctgttaggttagctctcgtcaatggtgattgagtctgggactaggttaacttaagggtctctgttgcagtggcaattaaatttggttaatgaacttgttgtctagggataatttattgagcatgtcaatcacctgtaaactgaggaaacgaaactattcaattaccccatcctcgggaattctttatctgattgattttattgtttactctactggtatttactgcatcttgtcatctgttgcttagtttctgcaattctttactgttactcgacatgatactcgaccacccagttgtctagtaacaaactgtgtagtcgagtatccctgttatattttttgtctgttacttgacttgtcactcgaccacacccagtgctcaccacacccagtgctctacaaagagctgtgttggtcgagtgttttcttatttctgcttgattttctgttttttacatgttcacttaagactgttagaacacaccaaaacctgttattgcttggcttgacttagtgactttttatcacatcttgattgttagcatcacactcatttggattgacaccctaaaatagtacaacgacataattggtgttttaggataattgactgaaaaacctattatcaatttggcgccattgtcaattgggtgtttttttgttacatttgagatttcagacttgcttagatcaagttctttttcaattttcttttctgttactaactgtgtgtttttcttgttgtcttcttgatcaaggtacacctctgctgtatgaaaaatcgatcaacagacaatcagaacctccttttcaaagacaacatcgaccgcatagctcgcgaactcagagaaaggagaaacacagtcaaccttgtaccccagcaaccactcgaaatggctgacgaacagaatcaacaaaatggccctgccaacattggtgctggagatgcaccacgtgatcaccgtcagcggaaaggaattgcacctcctgctatccagaacaacaacttcgagattaagagtggtctcatctcgatgattcaggggaacaaattccatggtctgccaatagaggacccactcgaccaccttgatgaattcaataggctctacaacctaacaaagatcaatggtttcagtgaagacggattcaagctccgtttgtttccattctcattgagcgacaaagcacacattagggagaagaatcttccctatgactcaatcaccacttgggatgattgcaagaaggttttcctatcaaagttcttctcgaacgccagaactgcaagactcagaaatgagatctctggctttttacagaaggctggtgaaagcttctatgaagcatgagagcgtttcaagggttataccaaccaatgccctcatcatggcttcactaaagcctctctgctcagcactctttacagaggagttctaccacgcatcagaatgcttctggatactgccagtaatgggaatttccagaaaagggatgttgaagaaggttgagaattggttgagaaccttgctcaatcagatggtaattacaacgaggactgcgataggaccgtcagaagcacaactgactctgatgacaaacacaggaaggagattaaagtgctgaatcacaagctggacatgattcttcttagccagcagaagcatgtgcacttccttgtttatcaagtccaagatggggagggtaaccagttggaagaagttagctacatcaacaacaaccagagtggctacaaaggttacaccaacttcaaaaccaacaactagagtggctacaaaggttacaacaacttaaaaccaacaaccccaacctctcctaccgcagcaccaacgttgctaatccacaagaccaagtttatcctccacagcaacaacaaggtcagaacaaaccgtttgttccctacaaccaaggttttgttcctaagcagcaatttcaggggaactaccagccgcaaccaccacctgggtttgcacctccgcaaaaccaaggtcctgctgctcctgatgctgaaatgaaacagatggtacaacaattgctacagggacaagcatctagctccatggaaattgctaagaaattatttgaattgcaccataagctggactgcagctacaatgacctgaatgccaaagtggaggcattgaataccaaagtcagatacttagaaggccaatcagcatctacctctgcacctaaagttacaggacttcttgggaagtcaatatagaatccaaaggagtatgcaactgctcacgccatcaccatctgccatgatcgagagctgccaactcgacatgtcccttatttaatcactagggacattgatgttcaagaaggggaggcttttactcagattgaagtctctattgttgaattcaacaattctgttggttctcgccatctcattcaatccacctcggaagagaaggccgccataatcgagagaatggtgaaacgattcaaacctactccattaccctcacgtgctcttccgtggaaattcaggaaagcgtggatggagagatacaagtctgttgcagcgaagcagctggacaagattgaagcagtgatgccactgatggaagttctcaacctgattcttgatcctcacaaagatgtaagaaattttatactggaaaggatcaagatgtatcacgactcagattatgaaagtgatgccactccatctcgagctgctgataagaggattgttcaagagaagttagaaaatcctggatctttcactctaccatgttccattggggaattagctttcagcgattgtttgtgcgatctcggaacctctgtcagcctaataccactctctgtggcaagaaggttagagtttattcagtataaaccttgtgacctgactttgatccttgcggacaggtcttccagaaaacccttcggcatgctgaaagatctaccagtcatgaataatggagtagaagtgcctacagacttcgtggtgctggatatggaagtagagcataaggatcccttaatcctgggaagacccttcttagcttcagtgggagcagtgatagatgtcagggaagggaaaataagtctcaaccttggaaagcacatcaagttgcagtttgacatcaacaaaactccacaagggtaaagagaagatggaaaaacctctggaaatgatagagtgatctcagaagaaggatatgagactgaaagagtaaaggaacttaataagaggtctgataagcaagatgaaactatagagaagctagcccacactgttgaggaacttagaagtaagttgaatcagttgcagaaggaagctcaacctaaaggcgggattgacactatcccgagaaagaagttcacttcaagaaggtctgaagagacatattaccctcctgaagagaaagaagcctattttgaagaaaggggaattgagtattctgttgtatacctctccagggaggacgctgagtatgatgatgatattagagaggactatgcagaccctttctatcattcattttcttcttaataagtgtgaggagtcaagctagagactttaaacaagctcacttgggaggaagtcccatgattatccttgtaaataatttttactttcttgttatttttgatatgttttacttgtgtttgtggttctcaggaatagaggaataacgtgaagctagagtaaaaattaaaaacttttactctacagatggcctagagatcgagtacattggtcgagtatgagtgatgtttaaaacccaaaaaaatttcaatcatcattttactcaaccaacgaaagctattgagtcttacagagagtttatcaagtctacaggagattgcgggattttctggggggttttcagtaaacaaagagtacaaaataaagacaagaagacattgtgagacccaccgctgacgcccatgtcctccatgcaacagaccaaaggacaagaaatctctcctcatctcttctcctccactcgacccccatccctcttaactcgacctcatcacctcgtcatctcttccagtcccattaaactcgacctccatttctcatccaaactcaaccaaactctcatctcttttctctcaaccactcgacctcaccatctctcttcctcacgcacttgattcctcaacgctcactctcattctcaccaagtactcgttttcaaatcatcatcatcttcaccgctttgctccattcactcgaccgccgtgagtttctctcttcaccatagacactcaatcgcaaacaaagaagaaggagaacaagactcaacttctaaaccgagtctagctttgaactcatcacctcgcctattcaagacctccttcaacactcgaccactgattacgtttcacctcatcactcgacttcacggcaagagcacctcctcctctcctccaccaccgttcacgcagctccatgtaggatactcgaccgcaacgccttcgtcatctttctcatcactcgactcgttctcttcaccatctctgagccggttctcgttcaccaatcactcgattcgccacagtcgaccatcactgcaactcatctctcactatactcgaccgcaactcctacataaactcatcgttttcaccgctcaagctccgtcacttcactcgaccttccaatatcactcgaccaacaatccacaaaccgaaaaaaaaaaattcagaaccggttaagatatactcgatcggtttactctgttggtttgtgtttttggttttgttgggctaacgtattaacgtttatctttgagtttcatttgttttcaggtttcattatgagtaactacagtggagaatcctcaattgatcctgattataatgtagacgaagctgagtcttggtacactagaccggagagagagcaacatgtttacgagagcttcatggatgaatttgaacgctctgctgctcgacgtaatcagagaagagctgaaatcgccagaggaaagagggcgatgtcgagtagatatgagctgattgatgaggacatcgaaactgagtatgagccagagtcatggtgtaaggagacgaagctgcagaacaaacccgacgaggttacagcggaggagtatatcagatttttttagatgaacgacttctggggaacgaggtatccctgctatgagactttagcccagctggggttactggaggatgtgcagcatctgttcgagaagtgtcatttggagacactcatggcttatccttacgctgcgtataaggaggagacaatcaagtttctttccacactgcaattggagatgtatgagggtctcacggactttgagctggataccatggggttagggttcctgatgttctcagtggatgattagcggtatcagcttttgatcaagaattcggaagaactgtttggtttccctagtggaaagggaaccaaacccaggtttgacagggaggagcttaaggatttgtgggctacgattgggaacaatctaccgctaaactcggcgcggtccaagagcaatcaaatccggagtcctgtgatccgctactttcagcgctcggttgccaacgttttctactccagggagtctacatgcaccgtatctaacacggacatggagatgatagattccgcgcttacagggattctccgccggacaaagggaaagaatgtcttgagaggcgatctcaacaatgcaccaccagtaatgcctctgttgatccacctgtgtggatacaagaagtgggcgttgacgaacggtaagaaaaaggtgagaggagcactatgcgtgggtggcgttgtgacgccaattctgaaagcttgtggagtaccgctcaaagaaccaaggttaacaccgagaatgatggacttggatcatttgcgccgatgtgagttcttggagtttgacatggttggcgactttcaccgctacaggttcgagcatccatcgattagaatcgccaacattcttctctcctgcattgacgctactaggattctcgagggcaaaaacattgacttcaagcctgcgcttgaagatctttatttcgaggacagtccgccaactgaggagattagtcacaccgaaggagctacaacagaagatgttgatgagacagatgatatagatgaggcagagtttgatacgaccatgtatcatttcagtgaacatatacctccagcgagggaaagcaagagtttgagcgaagctcacaggaacaacagcaagctgcagaagtggtgcaagaaacatgataagttgctcgccaagtgcctcagggctatcatgtttctgaaggacaagatcagctgctcctcttccactacagctattccgtagggacagctccctcaggacatgccctcgaggagatatgacgcgcccgagccaagtcggcgcaggcctgagcctagagagcaggagattccatatgtccctgcgaggcattcatcattcgagcctcgtgaatctgggaggaagaggaggaccacgctcactcgatctagcaggaggagcagacgacttctgcagtctcgtagtttacgcgaccgcggtgctgaccgcagcacaagaagagaggtcgagtatcctcagagttttgctggccgccacagagctgatgaggtcgaatacccacctgctagagctgatacagaacagggcagttcgtctatggcctgggagcaatcacaggcagccattgacgaccaacttcgttcattcttcgactgaggtaagcgcctcacttcaccattgtattatatcatctgttgtgattggatttgtcctgagtactctcttccaagtttattcacacagtggactgtgtgattaagtttgggggagggctcaggaagtgtgtgttgcactgtgtatatatttgagtttgcattcatctaaggcatagaaaaaccaaaaaaatttaaaaaatttcagaaaatgatttcacaaaaaaagagtgttcatgtagttgcattacatttaggatcgagtctagagtgtttcatttaggattgttgcatatgcataggggataatgattagatagccttgtaagcattttggttcactggataaactcagtgccttcgttgctagttgtctgttgcgtagtcaatgaatttgaaataaaactgaaccatgcctagattgctctactcaaccacactttcatgatctgataccattccctatcaatttgaacctgaatctgatctttaattatcatgtctgcatcaaatttaaactcatggataccctaaaatacttgcattttcttattcattttgatcactcttgttaatccaagtagctgactctccttattcgagcagttaacccaaacccaaacctagactttctttcaagccctatatcacttgtgagtgtttgtgaggtcttattccgattaagcttggcagaaagtgttaggttcgtaacgatagagatagtgtctcatgtagttctagttcacatttttcggactagataggactaggtgggcgcttatactttgggttgggatgtttttaaaagaaaaaaaaaggggttgattcattgatgagaaaaggtaaaagactctaggtgaaataagctaaagaagcagaaaaagtctagtaaaggttttgggatttgtaaagaaaagaaagagttcttgttatctattgaagatcggcaaaagccctgagttttaaaatgttaaaaacaggaaccttagttgttaaagaaatccaaatccgctagatgtatcaaattgttgagaaagcttctcctagagttaagagaagaaaaaaaagaatgattagaaaaaggacttaaaagattcatgaatgcaaagggtagagttaagttcttatattgggattggagatgggattaccattagagattcatttgatatactctgggtagatgagatcttatctctgtatgcatagcttgagacttacctttagcattctactaaagcttaatcatttttttgagagatcccctgttactgaagcctgttctgtaagagaccatctttgtctcttgaccttttaccaaatgagttcattgatgatgcattgcttgattcacgttccagagctaatgaatgttaaagggattggtagatttgaaaacatgtgtaggtcgagcatatgagtcggattgattaataacaaggcatggctaacgtttttgagtagaattcgatcatatcgcagcttagagctatcaactaggacattgatttcatctggtttatctggtgctttggctctgagtccccgctttttgagtccccgctttcaaacttcacctccagctctgaggacaagcaaaaactaagtttgggggagttgataagtgtgtattttgcatgttttgagcatccatttgtcatcattttaacatcatatcatcactgttttataccatttctcatcatttgtcatcactttccatgtttaggatagttttgcatgcatgctgcatatttgtgttgatttcaggtgatttggagctgttgacgagctgactggaagaagcagacctgatcatgtcaaaccactcgactctgaggtcgagtagaagcttcaagacctcaacagaccactcgaccccctggtcgagtatgggacttcacgatttcatctcatcactcgaccccctggccgagtaccaccacgattgatactcgatcacttcactcgacccccaggtcgagtgtcttcagctccaccacctgaccatcactcgatcacaccactctacctggaagtcgagtatcaccatcaccaccactcgactacatactcgatgtcgagcttcagagtcttttccatttcgcactcaaccacacactcgagcacaaggaagaaaagaagactccagctattcactcgacctctcactcgaccacctgggtcgagtacagttcttaatccgtcccaatactgcgtcgttttgagtattaggatttcagaatattttgctataagtagcatgtactttccattttcgagaagaagttttttttctaagttttattccacagacactgtgttcttgacattttgtaatccggatttctctaatctattcagtattcagcattttgttcttgattttgtttactgttgttcatcctgttatcatcctgctgttacattgttgttatcatgttttcatcctgttcaacgtttatgttctctccaatgatgtctgagtagtgaatagatttctgaggatgggttagagtagtgtagaattctcagtatgctaggtgattgagtttgattgatagatcccttctagattagttgttcttaatgcctattgctttctgatcaactaaatttgagcccagacctttccgcgcccaaaagttgttcgatgaaatgtctgaaccactaattccagagattcgtggctctgtaccaaggtattggttgcagggagcattttggctttaactcgttaattcgtaatgcctgttaggttagctctcgtcaatggtgattgagtctgggactaggttaacttgagggtctcttttgcggtggcacttagatttggttaatgaacttgttgtctagggataatttattgagcatgtcaatcacctgtaaactgaggaaacgaaactactcaattaccccatcctcgggaattctttatctgattgattttattgtttactctactgctgtttactgcatcctgtcatttgttgcttagtttctacaattttttactgttactcgacctgatactcgaccacccagttgtctagcaacagactgtgcagtcgagtatccctgttacattttctgtctgttactcgacttgtcactcgaccacacccagtgctctgcaaagagctgtgttggtcgagtgatttcttatttctgttttctacatgttcacttaggactattagaacacaccaaaatctgttattgcttggcttgacttagtgacttctgatcacatcttgattgttagcatcacacccatttggattgacaacctaaaatactacaacgacatgattggtgttttaggataattaactgaaaaacctattatcattcatccaaatctttgccttctggttttctctcttcatttctagcaacaaaaatgaattttctttcatattcattttagaatttttcatttgagtaaaacatctctttttcctttaattctattctattatcttttctttgtaacaaaaaaatgtcttcaagcaataatatagaagacgtaagaaagtagatgtataatcgtattaatccacgcattggacgtgtatccgacaattatgaagccgggttaagtcaattcatggagtttgcaaactatcgattatatgatgggggtcgaatatggtgtccatgtcgaaaatgtagaaatggagaacttatttctataactaccgtatctaaacatttgtataatagagagtttcaacccaactattatgtttggacagctcaaggtgagaagtttgagcaaggacaccaattctatgatcaagccgaagataatacattttaaacagttaaaccggaatgaaaattttaaactagttatattggagatactgtctcaactggagatatgtcaatactacaatcaaggtaaattattagttatatatataatgaaattaaatttaaaataattaattaaaaagtcttcctataaatatatatatatatatatacatatatatatatagctcttaaaatttggttaataaaaatattaattcgagttaaattaaatagaaatatatagaaattaataattagaagcggtgtgctagctatatataaagaaaaactatatgttctattatatattttatattttcatacattataaattttctttatcttaatccatacgtacaaaacataaattccctatataaataataataatacttattattacttcaatttcatcatataataataaaatttttcatctaatagaaattactattttgaagtggtatgctataaataaaaattattatattagatatatatgatcattgaaatagttataaatcttattcatcttagtccatacaaaaattatagtccatatataagataataataattattattattattaaagataaatattcaaatgaaaataaaaaacagtgatgttataatttggttaatataaatattaattcaatgttgtcatataataatatttttatgtcatctgatagaactcgtgtaaataaatatatgtatttgtgttatctataatagaaattcttaaattcatttgttaatgtatatcaaatatattaaatatggagggaaacatatatatatatatgtacttgttgaaaatgttataaatatagatctttcattagtactttcatttaatgcttacttccaaagtctattaaatagaaacatatatatatagtagtaaaatttggttaaaagaaatattaattaactcaatacaaatttcatctcacataaattaataattagaagtggtgtgttataaataagaattattatattagttattttttatactcgttaaaaatattataaattttatttatcttagtccatacaaaaaatgaaatattaaattcaattttgttagataataataatttatgtcatctaataacacttcatatatatataaattttttcatctaaaaacaaaactaaatttatttgttaatatatcaaatatttaaattataaagatataattgttggaacttctaattatgtacataagaataatgaaaaacaattaaataaataaatgcattacttaatattaggaaaataaaagttaatttataaagaaacgtgcatatcagatagttgaaggttgtttatcaaatttaattgattctatatatagaaaaatatattatataatttaattaattttttttatcattttgattagtgtacatactactgaaaattctgaacaattttgtgaatccgcggttgaagataatgcttgggaagcccctaatcctgagattgcagattttttcaaccgtttaaatacagcaagtgagtctctatatgacaactgcgttgaaggcttgtcaaaattttcgttggctgctgatatgatgtacattaagacgaaacacaatcaaactgaagcgtgtgtcgatgatactgcggacttgttttataaggttttaccaaaaggtaatgttgctccaagaacttattatgaaacagaaatgttgatgcggactttgagtatgccgtaccacaggattgatgtatgccaaaataattgcatgatttattggggtgatcctgacgaaaatctaatagtttgtaaattttgtgagcatccaaggtacaaacctcgaaaagcatcggtttgggctactagaaagcatattccatacaagagaatattttatttgccaattttatacaggctcaaaagattgtatctatccgaaaagacagcaccacatatgagttggcacgcagaacatacatgtcctgatggagttatgcaacatccttctgatggcaaggcatggaagcatttccaacatcttaatccttagtttgcatccaaaagcaaaaatatttatctcgggttatgtactgatggttttaatccatttggatcgtctggtggtaactattctctttggcccataattcttactccttataatctcgtgccggatatgtgtatgaaaagagaatatctatttctttccatactagtgccagggcgaaaccatccaaaacggagtttggatatttttttacgaccactaatagaagaattacaggaactttggatcaatggcgttaacgcgtttgatatttcagtgaagcaaaatttcaatttacaagcagttttaatgtggactataagcgactttccagcatatgggatgttgtctggatggacaactcatggaagattgtcgtgtccatattgtagagatcaaacggatgctttccaattgaagaatggtcataaatctagttggtttgattgtcatcgaagatttttacctacggatcatgtttttcaccaaaacgaaaggttttttcgaaagggtcatattgtcgacgatgacccaccatattttatgtcaggagaagaaattctggaaggtcccttggcttattattatggggtgaagaaaacagtggaatgtggtggaaacagtcatataaatagtgacatcgaaggatatggcgagacccaccactggcacaagcatagcatcttttggaagttgccatattggaagacacatctgattcgacatatccttgatgtgatgcatatcgagaaaaaaaaattcgataacttgattaacactttgttaaatgtcacaggcaaaacaaaagattctatcaaatcacggaaatatctcgttttatattgtgatcgaaagaaattacaccttacatcgtctggaaaagcccctgttccaatattcaggctgtctcctcaagcaaaaacagcatttcttacatggttaaaagatgtggtgaagtttccatatgggtacgtgtctaacataggacaatgcatacacattgatcaagggtggcaaatttatggtttgaaaagtcacgactgtcatgtcattatgcagcgactatttctgtttgcattcgctaaactccttcccaatgaagtccataaagtaatctgtataataaacttatttttgattctttttttgctgatgtaagaatatattttcgcgaactttgttcaagaaatttgaaagtcagtgatgttgttcgtatgaagagtaatattgctctgacactttgcaatctagagaagatattttcaccatctttttttgatgtcatggagcacttgactattcacttaccaacaaaagccaaactttgtgggccggtgcagtttcgatggatgtatccattcgaacgattcatgtttcatcttaagaaaaaggcgaataacaaagcaagtgttgaagggtcaattgtggagcaatttattaatgaagaaattacaaatttcagctctgaccactttaatcctgaagcgactattgtgtcgagtagtgctcagagacaacatgctagtggttttgctcaacagtacatctactcgtacgacgacgtgctagcattatttagacatgtcggaagtggaagtggaaaattatattatgagtggttaaccgatgatgacaaacacattgctcatacatatattctgctcaattgtgtagaattggcaccattcgaaaggtcatttaaaatttacatacatatatttacatacatatatatacatcacctgcagacaccaatattcaatgagatcgaatctgacattcttatgacttgtccttacgcctaatcaaacaagattgaaatctcaaagtgggattgaattctcaaagttggtttttaggtgttacggattgagcttctgaccattgtttgagagtatgatatatctctaagtcatgattttatattgagtttatgtgaaccaatggagacgagtttgattcttacatcttatatatatttttcatgggtttgattattggattcttatagttcatgggtttgattattggattcttagtcgtgtatttgattcttatagttcatgggtttgattattggcttttgttttggcacttctcttgggcgtggttgcttattaaggagctggaacggttctctggttgcttatttgtctatggtttgtgtttgttgtatctttagttggtttttgttcatagtctctataaaattgttatctaaagtaaaagttctctgtagatctttatttgcatctgattctgcagttgtaagtatttttaatcatagattgtcaaaagtatttgttgcctagatgcctgattgttctatgatagcttttcagtttacttttatgtgatttgctttgttctatgttttgatttactgcttgattttctaaagctttatgattcttttgcatctttgttatgttaacatctttggcatgtttgtgttcctttgatgcagctgattaaagattgaaggtataaactgatctgttcattatatccatcccgccgttaatcacagattgaaggtatcaactgatatgttcattagctagcttttggaattaagataggatcaatgcagaatctaataatttggagaaatctgattgaagctttcctttcttttgttcttacttagttctttcttccttgcggacaggcccatcttttgttctgaagctttcctttcttttgttcttacttagttctttcttccgtggttgagctaattctcttgctgagttttgtgcttatggagtgttccactttcaaaagccaccagagctatcatgttgcagtgaggatgtagaatctccaggtattggattcgtctcaactaaaacaaggcagcaaaggttttcatcattgaggacaatgatgttctcgagaagggagtattgtgacaggattaagagcttgtttctgtagtctttggttaatatatggtttagtgatgtattttggtttgtttattcagtttagcaaacacattatatgtaaacctttctctattagcgagaatcaatcaatcaaacacatattatcttcttcaatcattgaaaagaaatcattctaatcaaccactgaatgttttggtttccttctttgatcatcattattccacgtgtattgttgtgcttgaagcaattgttgcttgacttgtattggtgccagctctacttccataccttaccttgttctgtttttaaacttgaatctcaaggatttgaaacacctcctctgcttccttctactttgtagtcttttaaccctctgaggagcctgttgagatgcaaaagaaggctgcactataaccgtctcattcagagatatggtgacaggtgcgtcatcgtgaaacatatgagcgtgtttctgcagtcaaaggctccaaaatcttcttctcttcctctctaatccaactttagcatgagaacaaaaactgacagattttctatctttgctgtcaaaaagctgaggtttgaacttctatttccaagccctaggatagtttcttggtttccttttatcagtgatacttgttgattcatgatacaaacactccaccaaggaattgtttctctgcttaatcacccgaggatttataaccaacatcttcttgcttctagacctctctttgaataaagccatctccatgtcggattgcttctccgaaagaatttcctgttggtggctcagttctatcaccaaaagtgaatccttgctctgccacgtttttggtttcagaagtgagtcagtcaccaaacacaattcctctttatcaacattagctgccattgactccttaaaccatagcttctcttgtacccaatatcttgtatgtggcaggtttttgaacttgaacatccaatttttaggagacaaactcagcttcctcttcttcagtctttctttctgtggtgacattgtatcgagcacttggtataccatttgctggttagtgactcatgctgactttggagacaacacataagcttcttcaatatctaaaacttgtaattgctcttttagatgaagcaacaaagtatcaacgtccgaactagagtggcaagccttaccgacaaccagtgattcattgttaaatcgaaggcttggttccaatttagaagctggtacctgtggagttggcaaaataaatgcttttggctgaaccgcaccactctttgtcaacatcatagtggctttggaaaactctgttttgcgaatcaacactgcataatcacacccttcttgctgctgcatcacgtcttgcactatattgtctccattgttcaccatagaaatcaccacttcttgatgcacatttgaagtatcaattctcaaagttacagaatcagaagccagcatcagtggagatcgagttttggcttttcatgaaaacttaagacttctactgaaaactctgacttctgctgaaaactctgcacactttgagtaaaacgaaatcaatgcatacaccaaacaaggaatctccattacagaacataagatcaaacttaaataacatgcatatatacaccaaacaagaaatctccattacagaacttgatgaaacgtacattacataatatcatacaccaaaaacttaaggaatctccattatagaacataagatcaaactaacataacatcatgcatacaccaaacaaggaatctccattacagaactagatcaaacgtacataacatatatcatacaccaaacaaggaacataaatatatcatatcaaactacttcaaaattgcaatgattatggctaaggtaacaatgaaacgtgcccacgagattgcaattggttgtgcaatttttccttctctttccataccttcttctcttcttcaagcgtttttttctctacttcaagcttcttcgtctcttcttcaagcttcttcgtttcttcttcttctttgatcgcttgttgattaattggtgttctaagagactccttcaaagccttcaattcatctcttgcctccaataagctcaatttttgccaagtgcattgtttctcaacgtcagaccaagaaacaaagccatgaacatcacatctgaagaatcgtcttcccgaattatcatcggtccatgactttatcttggttgtggatctaccacagttgcaagatcgaccccagctcgaatgtccataacttccctgcccgaaactcatcttgctgttgttggcatcagatttggagatctgactagctgacattattttttccccgacggagaggaagaataagatgcaaataagttctaaagtgaatcgtcggcaagaaccctaattttggctaccattttcgagtttataacttagtactaagtagctaccatgtgcaacagtttaagtgtgacgacagaactaatagttgcggcgacaaaattgttgtagcagtagcaacataacaatgtagtaatagtgcatctttaagttatatatggattcatgttttacactaagtcttgaagaatgagacaaaagacaaagagactctacttgtaggagaggcttctatctgattaattaattataattacaatgtcattttaaatctttaggttgtgtatttaaactctcatcaaattggttttatcttatgaaagatcaattaatcaaacctttctaaatcatatgtaagattataaatgttttaataaaaacaatttgcaggtcggcctgcgggctatatatgtaaaggtaatatatcaatggttaataaaataaaaataataattggtaaaacttcatatttttcactaaatatgaaattataatatataaaatatatgaaattgtgaaaaaatcaatttttaaaattttaatatttacaaaaagtaattataaaagtattttaaattaatattttaaatttatttatagttttattttaaatataaaactaagtctgcgggtaagtccgcaaactcgtcagacttaccgggacatgcttggacatagtttctttaccctcggtcctagcggacaagcccatcttggtccatcaaaactaatgtctataacggccttcgtatttactatgctcaaatttgacacaattatgatgtcaagcgggcttctgacccacagactttggcccatatagtaccatgacatggcgggtttggaaattatattacatgaccgtaaattaacgtaaaatagcgggccggcctgaaaggattacgttttagcggattcggcccgcggattggggggtatgcccgtacaaatattcagtaaaaatgagtaaacaatttgtaaaaataaataattttatttaattatggtactataatatataaaatatgttataatagaaaattaattttttaaattgtaatatttacaaaatgtaattaaaaaaatattttaagttaaaaataatataaattaatatttataatattttttttattatcttttaaataataaaactaatctcgcaggcctgcccacgaacccgttgggtttagcgtggtgggcctggacattgtttctttgccttcatttttaacgggccgacccagttggaggtgggccaacccgtttgacagaactagacataatcagtggattctgttacaatgtcattagaaaaaatgtaagcacaaatttaattctcctcattaagggttatatataaagtaatgttacttttgaatccaattgtgttaattgctaattatggatctaaaatacggggctataaaataatatctgttatttttaaatttaagatttcacaattttcggtttgaatattctactatttttaatagtttgaaatcttgcgtgaccaaaattattttatcacgaaaagaaagtatattatattaaaaaaacaaattaaaaaccacatgtcagttgaatcaaatcatataaatgaaagttggtcagctctccccatatgagtgacacatcatcacaccaatgagtgccacatgtcattctaaattaatatcattaaaaaataacaaaacttagtgataaaaaaaaaaagtttcacattgcattgaatcatccattaatcccattcttaactaaatatcttcatcaaaaagaaaaaatatgaaaaatcatgttaatgtattaaacactactttcattttacttttttattttgctattttttaatagtcattacttgataacgactataaattttcgggtattgcaacttagttgtttgctaacttttattagtttagaattttaacttagtatttcttattattactttttttgtcgatatgatatggtctttttgtgctttacgataaatgggtaacattaataattacatacatgttttttttaagtaatggtcttttgagatgttatatatactaaaaaattcaatatacgacactctctccaatatagctatatgcaaatgcaaagagaaaaacctaaaaatgttgacctaaaatactatttaatttttgcttttttttttctctttcatgtgaaaacttttaaagcaaatgagtatagttaattatacatttgttattcaaatcacgtcaatccaatatttagccatgagcctatgattggaatactagattaggagagaatacatagattgaattttttgcttagaatcaatttagacaactttcaaaccaaataagtaaacataattgcataccattgtatcatgtattgttgatgtaagtatttcatgatagtgaaaaaagattagaatataattgatatttgaatcaaaagtgaatctaactatacacatataattacaaaaaatgaatataactttattaactacaaaataccatacacaaaaataacatgaattaacaataaaaatagttaaacataattttttttaaacaattttcaaaacaacaacccacgcatagcgtaggtactctcctagtttatttaatgtatttaaaatttcaatatattatttagtataaatattaaagaaaccgtaccatgttaaacaaaatatgaagtctaacaataaaaataattagggtttaattttttcaaaatctaactaaattaactaaagaattttaaaaaataaaaataattgaataatgaataaattcatgaataatgaataagtatcaaacatccaaaaattttgggctaccgtgatgggcttttaaaaattcaataacccaataagattagttacattataatttgtaactcgttagtaacaaatagacgcggtaaaactttctccacgtggcctgcattcggaagttgccgcgtcatataccgtagtcatttcataatgccgtgaagtcgtctaaataatcattacgtgtactcacagttcgaaacgacaatgttgtagcaaagtttttaaaatttaaaataattctcgaatgcctcattaatattatcttctcgaggaagcggaaacgattcactgtacctttgaacaccctaaccagctttactctcttctcacttctctcttctctctaagggcgatgatatcttgcatgtgagatctcgatctctcgatatccaaatccccacaaatactcgcttctgatctgagaatctactactttctagcttcatcaaagttgttgtgtagtcgaatcatattctctccatctccgacgctcgatcgctctctctcgaacagacccgtaacctagttctagtattaacgacctgtctctctcgtcatcactccatctccgacgttttctcagcttttacttcttcaacttcaaggtaagccgcggttttcttctttttgattttacagttcgagcttctttcttttttcccagataaatcttgcgtgtgcaattgtttgaagctatataatttttgaaccaagggagatttttaatatcgactttttgacgagtttgtgattttttatagaaaccctagatgtaaagaaaaaacagtaatttttttcatctgttttaccaaagattttttcatcagttaaaccctactaactattctagtcttttttgatgtatattgtgcaagatgaatcttaacggcggtggttctggctctagtggttctggatctggtggttctgtctctggtggttctggatctggtggttctggctctggtggttctggatctggtggttctggctctggtggacgtgctaatggtcgtggtaatggtggacgtggtagcggccgtggtggtggccgtggagatggccgtggagatggtcgtggaattggtggtggtggccgtggaagaggaagaattc

SEQ ID NO: 1476 - DNA, 130299 bp, Arabidopsis thaliana
aagcttcattcggccttgagaattttcggagggagaaaggagagagaaccgaaaggcagccaaattatcaagggatcgcacgtaaccgagagaaaacttgtccgcaattgagaaactcttcccgtaatcaagatcctttgcccctaactaaagaattcatgtccgtgatcaagagaacctgtttgtcgatgagaaatccctctctgcaaccgagaatcgttgaagctaaccttaaaccttcaaccgaatctctatgagtatcgaagcgtgtgatatggcacatgataggtttgggtgtttatttgggtgattgattgcttgtttggttgcatgatcatgtactcttgcattcattacatgatttcatgaattatatgagtattgattaatggtgtgaatgatggtactaagtcgcataattgatcttttagatttttaaggtaaagtttatggttgtgaggttgtgttgagattttgatgattctatgtgtttgattaaccatatgtttcataatatcttaaaatgttgggttttgatgcgtggtgctcgtggtaggaggcagagactataagcgtatcaagatcgtggtatgtctgacctacgtagtgaaccgtgctattgtggggtcttgttaaattgttgcttgatcgccagttagtgcgaagggctgagagagacggatctagctaccttggccgagttgtctacacgacggtgtagcatttggtagagatgctctggttacatgcctttgtggttgtaaagcgagagatccagggagtgtgtgtttggtgtggggtgaaggcagcataccgggccctttttaaaaataaatacttaataaaagtggagtcttaattgcatgtgcatttggtagatgcttgggcaagctaccttttgttgctattctgttttgcgtgggatggggaactaatatcggttgcaggtagaccgagcttactaagtaatcttagattacttatggttccattttgttttgcaggaaaacttagtgtgaaccattagagggatgctcaggacgtaagaaagccgatatagagttttgttgctttttgcaaaacttaatggttttggttctcgattggatttgagcgtctatgctcaagggcccattgttaaaatgtttggatacttggttgtacaaaatttatatgttataaaagattattttcttataaagagtgggtttcatgcgatagtagtcttatccggactaacataactcacgatcatggcaagggttaaaaatccttaaccgtgtcgtgagggatggttcatgtgggtaatccggctaagggtataaatttgtttggaacctaagttgggtagtctgtgtgagctatcatcgtagcgtttttgggttacccttggcttgtttggccatagagcgattcgggggcgttacaggtagtcccattgatactatttgaaacgaaccaaggctgccttgaaagcttctgtcggaccttgagtaaaggtagacagcttgtttgcagctcctcagacttagcatcatcatagaagttgttcaggaaggctaacttgatgcttctccaagtagtgagtgaaccagccttcaattgcttcaaccaagaagcaacatccccagtaagtgagtaagggaaaagcttgcacagcaggtagtcctcatagatcagctactcgaccaatcactctatcaaggcagccgcaggggaagcaacaaacatccactcgaccccctactcgatccactactcgaccaatcactcgaccaaggctaaaggattctaccttacttgttgatcgatcaaagcgcctttagttcctcctcatttccccactcaaccatacggatgagcattagaagaggagaggaagaagaaattactcggagcatagaggcgaaggcgcagactttgcagcaccctttttactcgatcccgaatgtcgagtatacatctaaaccgcctcaagtctcttgtcttctagtgaatcaagggctttcaagattttagtaaaccccaaaggaccaagcttttattatgtagtttttctttgtgttttataatcttgaaaccttaattactcttaatctatttcatttttgcatttatttatttgagtaaagttatttatcttgtttagatctatattttgatatgtttagattatgttgcttgagtactgattggggttcttgaggatggattagattagagtaatttctgagttagtgaggtggttaagattaggttagctcccttctggattcgttgagcataatgcttatttctctcagttcagtttggaattcgacccaaggtattccagcgtctaaaagacgtttaaatagatgccttatctacgaattccagagatttgtagattctagcccaaaagattggatgttgagactgcttattaactttaataagagaaagaaaatttcaccaaacttcaaaggagaaagaatttgctaaggaatgaaagccgagaagatggacatgaacttggccgagtgatgggaaacaaaacgtcgagtccgaataatctagccgatcgatagaatttgtcgatcgtgaattctgccgatcgagagaattctgccgatagagagtctagccgatcgatagaatctacttatcgtgaattccgctgatcgagagaattctacagatagagaatttttgccgatcgagaattctgccgatcgagagactctactgatagagaatttttgccaatcgagagatgctgctcaaggatgcacgagccggttgacttgaagcccaagcaaagtagcttggagccgaatttatgtggagtggagccaaaatccaccacccttggagctgaagtttccccattccacgtgttaccatcccattaaggctgcttgcgtgtcatcacaggcagatgacaggtgtccttgatgactcgcccatgccgtccctatataaactccattcggcctaaagtattctgagaggaaaaagagagggaaacggagaggctgccgagttttaaagtgaccatccgaccgagaaatggtgaaaaagtgttaccatcgagaaactctgcccatgatcaagaccctttgtccgtgtttgaagaaaacttgtccgtgaatgagaaatccttgtccgggaccgagaattgttgaagctaaccttgaaccttcagacgaatctctgtgagtctcgaagcatgtgatatggcacatgataagtttgggtgtttatttgggtgattgattgcttgtttgtttgcatgatcatactcttgcattcattgaataatttcatgagtattgattaatggtgtgaaaggtggtaataagacgcatatgagattttttagactcttatgctttaaggcttatggtttggaggttgagttgagtaaggatattgatgattctatgtgtttgagtgaccatatgtttcataatatctagaaattttggggtcttgatgcgtggtgctcgtggtaggaggtagtgacaataagcgtatcaagattgtgatatgtctaacctttgtagtgaaccgtgctatcgtggggtcttgttaacgttgttacttgattgccatgtagtgcgaagggcttggagagacggggttagctaccctggccgacttgtctacataatggtgtagggtttggtagggatgctctggttacatgcctatgtggttctaaagcaagagatcccaagagtgtatttttggtgtgggggtgtttgaaggcagtatatcaagccctttaaaacttaataaaatttgtagtcaaaattccacgtgcatgttttggtagatgcttcggcaagctacctttcgttgctattctctgttgcgtgtttcaggatggggaactaatatctgttgcaggtagaccgagctcagtaagttatcttagattacttatgattctaatttgttttgcgggacaccgtagtgggaaccattagagggatgctcgggacgtaggaaagcctgtatagagtttgttgctttttgcaaaacgtaatgattttggttcttgtcggatttgagcgtgtatgctcaagggcccattgtttaaacgtactggatacttggttgtacgagaatttatatgttataaagtattattttcgtataaagagtgttttttattcgatattagtcttgtccggattaacccaactcacggtcatgtcaagggttgaaaagcctaaaccccgttcatgagggatggttcatgtgggtgatccgactaagggtctaaatccgtttggaacctaagttgggttgtctgtgagagctatcaacgtgacgtttccgggtttcccttggcttgtctggccacagagcgattcagaggggttacaattgttggtatttgagcatggttcatgatgctcatgggacaaacgtttctaaaagttttattgagtaaatgagtcgtaaaagcgattaggtaaaccggtatgtctcgagttagtcgagaatgggattaggtattaccattgttggttttgccattgtttggattggatcgagaatggatagccgtgtgatgcgatttttatttcgccttaggcttttacctgaaagaccacacgattactgcaagtgcacaatatatcagagtagtatttatggatcgaatccatgtggagtgtagctacaaggaataattcaagtaacgtaacctggatcaagacaaacgaaagagtgggggttttgtgaatgcaatgaaaattagtaaagaattcaatggaaataagaaagcaatagatgtaaactacaaaaatgcaataaaagtaaatgtcaataagaagagctgtgtaaagcaagtaaaacgaaactctaggtctttagggttttctcctggcatcatggttcaacataaaggtatagatcccaatctagatgatatcatggttaggtttgtttacttccaaattataggacatacgaaactcattcaagaccagctagccctaatggctagtaggtggaagccggctattctcactaatacctcgtgtactcagtttccctaacggctagtaggtgctaacatggtttcgagatacaagaccaaagcatttagttcaagtccgattctagtccataagtccctatcactcggcgggcgtgcaacggttgtagttctttattcagtttagttagttaaagcaattatacaagattctgccaagtataaagaacataagatcatgtactaggtggcgttccggacatacatgtatgaagattaaattcaactagaaagaatagtgtaaacgatcaaagaaaccatagaaactgcaaacttaaacttgatctaaggtccccatgaataccctttgaaaccccataaaaccaatctagagatctactcacacatattcaaaaaacacaacatcatatgaataagcaattgcataaaaagaatatgagtatgaaaagggtttagacatcttctatggaaatccatagcttgatgaatcttctttcttttacaagtagagaattaataatagaagagaaaagagaaaacaaatgaagaacaagaggaggacggcttggaggccatgagaggagcaggaggcagcctaattttgtggggtttgattagggtttcccctaatccttatatttatagggtttcattaggtcaaatggtagaaacgtccttccattgattagtaagtgatgggccaagttcctgggctacttagggaggcttgaagtcggtggcaagatgaagggaaggagtggttgtgcaccctaatgatcgatggaagacttgaggggacacccgggttcaagtctcttcggtcggcggttttagattgatcatttccaaaaccgcgattctatgacatgtcttcactctttgggccataacttcttaacggcttcatggctttcttcgattcgacttcgaaattaatcttgactcttttagctttccaatgaaaccaagttacctccatgacgatatcgggtagaccttggccggatgctaaacatctgaggcacataaactgttatgaaacggaatttggtcgtttctactcctttttgcatgaaaactcataattcttccttgaagcccaaatactcaaaatataccttgaagtgtcctttaactcttgatttctccatggaaaacctaataaaacatagtaaaaatgggcaaaaatacgatgttatcaactcccctagacttagactttgcttgtcctcaagcaaacaacaaagctagactagtggagctgttttgaaaaagcgggaactctcctactatcagagaccatgttctaaaatatatcccgtggacgtataaaggcaaagacatctcgttagaacattctcactatagacccaaaactttcactatccttttccatccgtctcggacctactagagaactctagaatctcgttagttaactctctacattaattataagtggcgtgagctgtctcaatagagagtgtcatttggggctcccttctgtaattggctcatctctcctttagatggcccatgtctttccttgaaacttatcatatgctattggactctcttagttgaaatgtttcctttccttcttttttttttttattattattattttattttcttcttttttatttatggaagagaaaacagatgtcctaatcaccgaatctaatgagcatacctttttgaatttgttccaatgaagaataagctcttaggtcgcattgttgcaatttctcttttacttctttctttcgtttttgtggcgggaaactgtgttgttcctttctctccgacgtttttgcacacacttgctaaacaaaaaaggaaaagagaatgcatgaggcttaaaaatcgtataggatttaagggcaggaaccactaaaaatgagcaatcaggatcagcagagagatataaaaaaggataagaagtcctgaatgtatatgctcgtgtccttgatctaacaccccttcatgagaaagagttagggtgaggttaaatcgtccaaataaaatagagttaacgtcaggtcaaacagaatctctatagtgagacttcaggagaaagatccggtagtgggtttataggtattgtccgtcctacaaattttgtcacttagggaatgagttagcacatttgtaatggtcttattcatcatatagtaggttcatcgttccatacatcgtccttgcccaatgatactttgaaaagaaataaaataaaaactttttgctttgttagaacgtattgataataggtttttaatcaattaatcctatagcactatcatgtcgtcgtagtacttagggtgtcaatccaaatgggtgtgatgcaaacagatgatatgtgatcagaagtcactaagtcaagccaagcaataacaattttggggtttctaacagtcctaagcgaacatgcagaaaacagaaacaataactgaattactaaaatcactcgaccacaacaggctgatgccagaagtaggatgtggtcgagtaacaggtcgagtaacagacaggatatgaaccagctatactcgactgcacagtctgttgccagacactgggtgtggtcgagtaagttggtggagtaattgcaaaaactaagaaacaggcaatgagaacgatgaagcgataatgataaaacagagaaatcagatagacgagaaattcctaaggatggggtaatcgaatagagtggtatcctagcctattcaaatggttaacaagcgcaatcaagctatccctagataataggttcaacaacagatcaattcactcccgtgatagaaatcctcaagcaaagctagcaagactaattcccattaacggaatctaactatgctggcaataagaacagactgctaaagttaataaacgctctaaacggcaaatcccttgggatagagacgaattctcaggaactagtggatcaagcattccatcgaacaccttctgggtgcgggaatgcttgggatcgaattccagttgatcagaaagaaataagcagtaaacaaaactagtcctgaagggattcaatcaattctaaaacttaacaattctacagactacggattgcacaactactctatcccatccttaagaactctatgtcactactcagacaacatgctcaaagacataaacgcaggtaaatgataatattgcaaaagtaaagagataaagagtagatgacaggtgaaatcaaatgcggaatctgaataacttggaaaaatctcgaattacaggttgtagaagcaaaagcggtgcagccagagtaaaacagaaaataaaactgaagcaaaaactcaaagtcaactagatgtctcaggacagaaccctaagacatctatttatacaaaacgaaataaaatgatagtagacgggccaataacctaatcacccgacccatagagtcataatgggccaagatgggcttcgtgatccgatggggctccaggccgcttccaaacacttcgtcttctcctcttctcttccttgtgctcatcttgtctggttgagtgcggatttgagtagactccaaagatgtgatcgagtacttggtcgagtgatggtgttcatggggagtgatgatactcgacctgggggtcgagtaatgtcatcgagtggcctgagttgcggttactcgacctgggggtcgagtagataggtagaatggctccaaagtcactcgaccagggggtcgagtattgtgctggacgtactcggcctgggggtcgagtatgtcctctggttctggctcgcttcttccaatttgctcgcaaacagcttaaaatcacctaaaaaaaactcagaaatgcaatatgtatgcaaagctatcctaatcatgcaaagtatgcaagaatgataagaaatgatataaaacagtgatgaatgatatgaaagtagactcaaaatgatgatgaatgaacactgaaaacatgcaaattatagacatatcaactcccccaaacttagtctttgcttgccctcaagcaaataagaagacatagttgaaggagaggtttgaaggtggggactcagaaccaaagcatcaggtagagcaaataaaatcaatgtccaagttggtagttctaagatgcgatatgatcgaattttactcaaaaacgttagccatgccttgttatcaatcaatccgtctcttatactcgacctacacatgctttcaaatctaccaatccctttaagattcattagttctagaacgtgaatcaagcaatgcatcatcaatgaactcatttggctaaggtaatggtcccttacagaataggcttcagtaacaagggatctctcaaaaaatgattgagctttagtagaatgctaaaggtaagtcccaagctatgcatacagagataagatcccatctacccagagtataaaaatgaagctctaatggtactcccaactccagtgccaatacaagaacttaactctaccctttgcactcgtgaatcttttaaactctttttcatatcattcttttcttttctcttaactctaggagaagctttctcaacactctgatacatctagcggatttggatttctttaacaactaaggttcctatttttaatcattaaaaccaaaggcttttaacccttcttctttagctaacaagaacctcattcttttctttaacattcccaaaacctttactagattctttccctttccttatcaacaatgaattcacccttttattttaaacacatcccaccccatgatataagcaccaacctagtcctatccagtccgaaaaatgcgaactagaactacatgagacactatctctgtcgttacgaacctaacactttctaccaagctcaatcaaaataagacctcacagacactcacaagtgatatagggcttgaaagaaagtttaggtttgggttcgagtttagtgctctaaaaaggagagtgagccacttggactaacaagagtggttaaaatgagtaagaaaatccaagtattttagggtatccatgagttctaattcgatgccaagacatgataattctaaatcagattcaagttcaaattgatagggaatggtatcagatcctaacagtatggtcgagtagagcaatgtaggcatggtgctgttttacttcgatttcattgactacgcatcagacaactaacaacgagggcactgagtttatctggtgaaccaaaatgcttataaggctatctcatcattatctcctatgcatatgtaacaatcctaaatgaaacactctagactcgatcctaaatgcaatgcaactacatgaacactgtttttgtgaaatcattttctgaaatttttcaatttttttgggttttttctatgccttagagcaaatccagtgattagtttctaaagtatagtttctatgtattttttattaataaatttggatagttttgtagtttagaaacttttacgagtttttggaaattttttggtccattggtggaatccttaagtgggtttctaaaacaaaaaaattttgaaaaaaagaaaatttgttaaatatttttatttgagcaaatatgattatgattaagaattatcaaattttaaacatacatgatatagaaagaagaagcaaaaaaacatatttaaaagcggaaaaaaaaacgattacattttaagattgattctagttataatgttgccatacatgttcaactaaatcagctttcaattcttcatgtttaatccgatcacgaactcgagctctagtggccatcatattaccgagatttgaaggcatatctgtagcataagtgaaatccacttgtgaagagctagctgattctggatgtacgaattcagatacatcaaactgagtgtaaccatctcgttcgtcctctactatcatattgtgaagtattatacatgctcgcataatattgccaattttcaccttatcatgaaaaagagctggatgtttgataatggcaaaccgagcttgcaaaactccgaaagcacgctcaacatctttacgacaagcttcttgagttgtagcaaataaagaagctttattaccttgtggaattgaaattgattggataaatgtagcccatttaggataaattccatctgtgaggtagtaagccaaattatagtctttcccgttgactacgtatttcactttcggagctcgaccttgtaatatatcatcaaaaactggtgagcggtcaaaaacattgatatcgtttaaggtacctgggggtccaaaaaacgcgtgccatatccagagatcttgtgaagcaacggcctctaaaacgattgttggttttcctgatcaacgtgtatattgtcctttccaagcggtgggacaatttttccactcccaatgcatacagtcgatgcttcctatcatcccgggaaatccacgttgctctccaatatggagaagtcgtataagatcatctcgtgtgggtcttcttagatactcatccccgaacagatttatggttccttctgcaaaatgttccaaacataacagcgacgtgctttcaccaattcagaggtattcatcaaccgcatcagccgcaataccatatgcgagcatacgaattgctgctgtagacttctgtagtgccgagaaaccgagtcttccggtggcatctcttctttgtttaaagtatgggacttcattggagaatttctcaacgatacgcatgaacaacggtctgttcattctaaaccggcgtcagaatatatggggaggatatgttggattctctgtaaaataatcattcactaattggatgtgaccttcttcacgatttctttcgatatatgttttttttttccttggcttgactcgttggcgattaccataactctctaatgcttgatcaaagcattgatcaaacttatcatcgaacatgtcgtcgagattatagtttgaagaagaacctgccattttagcaaaattatagaaagagagaagagataaaaatgatttgataaaaaagagtgtttattattatgataaagagagttgatagaaatattgaagtagtgttcggattatatatagaacaataaaggagtagtgtgttcggaattctttttattcggtgtacattcattcatacaatataaaggagtagtgaatggtgcaaatgaatggtacaataatcaatggttcaaatgaaaagaacaatcaagtttgtggtgacaaaactaaagtacattccttggtgacatactaaagtacttgatgtcggcactaaagaatggcaaacacttggacttgatattctttcttctccattaaaacaaggcttatgattctgtgattcagtagtggtttgtcatcgttaaaagaaacacatattttgtcaaaccggttaaatgcggtctgcgtccacatgtgactccaattaaatgcggtccaaaatcattgaaaatgttcacaaacaaacaaattggttgccaatgatataatacattccaaagagcacggacttataactttttcaacgtttctgaaacgtttttgttgctagtaagatacaagacctaacttttgttttgttggctctgtttcctcagttagatgctccatgtgtggtgcaagacctaacaggtagtgaagctcaattgtccctgcaggattcacccgatatgattctgttatatatacacactcaaagctccaaggcagaaaatgattctacagattagtgagcgtgaagctaataaaggtgcatgtttaagtttcattgtctgcaaattctatcaaaaatacataggagattgatgtttaaagcttgtaatcattgataccttcaatcatacatctattgcagatcgaaaaaatgtatctggttttacttcttcgtagcccaaattctattcctacatagccataattttttagaacagatacagtatgaagaaatttgtgcgagaaaactaataataaaactccacactgaagatccaaagcacaaccaagctcgttaaccagttgactaaaatagaaaccataatcctactgttctgttattctgcaaatgtatgactgctaataagatacaaccaaaaaaaaaaaaaaaaggtaagagtcagaagaaaacttaaccggattttgagcaagaaactggtcgtctggaacaagacctaacttttgttttgttggctcttcattttcttctttctcacatgttctgcatcagtaaaataccaagtaagcttggagactagatcaaaaatagaacagaactgaagtgaaagtgaaagtcaaacaactcaaactcataaactgaaactgaaagtgccaaagtgaaacaactcaaactcataaactgaaacaactcattgattaacatagtcatacacttaaacataaaacatagacaaaaaacagacactaaatataaaaacacacttgaaacagacactaaacttaaaaacagagttaaaacagacacttagagaaccataatctagaaacagacacttaacctacaactgaaactcaagccaacaactcattgattaacttgttcttcagttcaatctctatgtcagatagaggttctgttttccctaacagacgctcaagcaacttagtcctatttttcttctctttaataatgattagcttctctttggcagcgtgatctttctcttttatctcccatatactttttatctccttcaaagcattggtttcttcaccttcatccggacttagcttgccttttcctttggctttggctgcggctttggccgccttaacaccaatgggacgagcttccttgtcttcaaggccaacaggttcagagtcatcttcacattttcttctctttgctttcccatgagtagactgagcaatccacttttgatcatatctaagctccctccaagcatgctcacaagtaaacttgcagccataatcttttgagaagatctgatgtgccaaagacaccacatcatcatcattttgaccacttgtttgttgtttgcttgcagccaagtagctccctacaaacttgttcacaacatcattcacttttgaccacctttgtttacaacatatgtggcctctcttttccacacctttgagcttgggacttgagttgtagtacgctgctatacgttcccagaaagctgcccccttttgctcattgcccaccaccggatccttggaagtgttcagccacccacttatgagaacaacatcttcagttgatgaccaattcctctttggtttcttgactttcttccctttcttccctttcttccctttttcccagcaattggtgcttcatcttcacttggatcatcatcagaccactcagtgctatacacagggacatttgctgatccaagttcaaagcattcatatggatttggtgggagaatgtgactgtcatcttgactgttcaaaaggtttataaagcttgaagtatgatgatatggattcggtgaatccatattattgtttgtggttgtgtgttttaaaaatcaaaggttacggttttgtgttttaaaggcaaattatggctttgttagacaactcacaatcaatgccatactaaatactattgactaaaattaacctaccaagcaatcatcacagttttacagttttaaatgctataagaactagcatttgacgtttacctacaaaagcaattgacgtttatctaactacagttttatatcaacaaagaagcatttatcacagtaaataacagcaaagcattgatcacataaataaatacaaaatgataaattaccttgcattcgatctcaagccaaccacctttgcatttggattatattcaattaagaagcagcaaactttgttgcaaatcctccaaataacctcagaaaaaatatagaaacaaaaacttaattaaaacgaactaccaaaagatcaaatacataatgcaaaatcgttgtccagatgctttgaaggcttgaaagattaacaagcaaaagccagtttatgcaatgaatacacgacatctaaacttttcagacaaccaaatcaaagtatccaacaatacttaaaccttgagccacataatgctcctctatctaccacaacaaaacatatacctgaatccgtaagtttttctttgaaggatataggtacaaacaaagctacagaacaaacacataaagatctgaaatttctatgttaatatagaaacaacaatatgacttcactgagaatgaagcaaacatatagaaaactaagaacaagctaataacaacatatgcagctcaagcttagtacacgaactaaaaattcccagaattcgtaattcaatatacataccaatgcaatcagatcataatctctttcaaaattcaatttcaaagctcataaaatcaaatcgattcgaagaagaagagatacgaaccatgatgagggtttcgatttggttagaagcagaatcgatttggggtctccgtcggcgaccacgaagaaatcagagagaagaagaaaacaaaaaaacgcgtgttttttttttttgtttagtcaaaacgtttacccaataaaatgaagccacgtatgagtttctattgggtcgcgaaaaacccaattttaggaacgatcctaaatggattgttctgttttttttcatccgggcccattttttttaaaaaacccaacatagaaacccactaaaaacccttgctagacttgctcttagatgaatgcagactagagattatatacaatgcaacacacacttcttgagccctcccccaaacttaaatcacacagtccactgtgtgaccaaatttggaagagagtactgaggacaaaacacatcacagaaacaaaataaaaacaagagatggtatattacaatggtgaagtgaggtgcttacctcagtggaaaaaggaacggagttggtcgtcaatagctgcctgtgattgctcccatgccatcgaagaatctccctgttgtgtctcagcttccccgtggggttactcgacctctgctccttcgtcgcggccagcaccgctctgatgatactcgacctctcttcttctgctgcggccagaaccgcggtcacgtaagcttcgggactggagaagtcatgtactcctactgccagattgagccaatgcagccttcttctttctcccgagctcccgaggctcaaatgatgaatgcctcgcagggacctatgagactactcggtcactaggctcaggcctgtgttgaactggctctggcctgtggcgacttggctctgacgcgtcatatctcctcgagggcatgtctagaggaggctctccctgcggaatagctgtggtagaagaggagcagcttagcttgtcagtcagaaacttgatggccttgaagcacttgatgagtagcctatcttgtttcttgcaccacttctgcaacttgctgttgtttctgtgagcttcgctcaagctcttgctctccctcgctggaggtacatgctcactgaaatgatacatgctcgtatcgtactcctcctccctatcctcatctgtctcagcaatctcatcctctatagaatctgttgtagggacgttgtcatcagtcggtggagcgctctcaaagtagatgtaatcacgcgcaggcttgaagtcaatgttttcgccctggagtatggttgtggcctcagtgcagggaagcagaatgttggcttttcgggtcaaggagtgctcgaacttctagcgatagaaatcgccaactatgtcgtgctccagaaactcacaacgacgcaagtgatctaaatccatcatcctcggatcgaaccgtggagacgtgagaggtacaccacatgctatcagaattggtgtcacaacaccacctacacaaagggctcttcgcgccctcttcttcccgttggtgtgcgcccacttcctgtatccacagaggtggatcaacagaagcataaccggtggagcatcattgaggtcgccctttaggaacttcttcccctttgttcagcggagaatgcccgtgagtgcagaatcaatcatctccatgtctgtgttagacacggtgcctgtagattccatagagtacagaacattcgctacagagcgttgatagtactggatcccagggcttcgaatctggttgctcttggacctcatagagttgagcgccatatcgttcccaatagttaaccacaaatccttcaactcttccctctcgaacttgggtttagttcccttttcacttgggaaaccaaacaatccttccaagctccgatagatagctggtaacggtgctcgctcactgaaaaagtcaagaaccgcaacccttcactctccagctcatctgctgtgagtggagagaaactctattgtttccttcttgtaggcgacgtacgggtaagacatcagtgtctccagatgacacttctcaaataagtgatgtacgtcctccagtatccccagctgggctaaagtctgataacaggggtacctcgttccctagaagtcgttcagctctcctctcattgcgtcaagctactaagctttgggtgtcagctctgaaactctcataagcctgttgctctctctccggtctagttgaccaagactcaccttcatcgacgttgtaatccgcatccatagaggactcgccactgtagtaactcatattgatttcctggaaaaaaatgcaactcaaacctaaacgtcaatatgttagttttaataagcgcaaacactaaaccggccgagtacacggtcgattaaaccggtcgagtacgttgaaattgtggattcgagttttgcggttttgcggtcgagtgaaagtgaatgagagacggtaacgtcgtggttgagtgaatggtggcaaggcttgtttggttgattgtagtggcagtttggtcaagtaaacggcgaatggagagaacatggtggcggttttgattagagatggcaacgatgaggtcgagtggttgagagggggtgaggagggggaggcgagttccttggtggccgagtcaagcttgcggtgagtgaacggcgtgaggtcgagtaaactcgagtatggaggcgacggaagcacggtgaatggcgagaaactctggcgtagatgttgaggcgaagcgtgaagtggtcgagtgaaggagagatggtgagcagtgagagatggcgaagctagaacggcgaggagctccggtaaagtcgagtaaatgaagatgaagatgaagcgcggagaggtcgagttgtggtcgagtgagaaggagacgaagctgtgaggaatggtgaagttcgaacggcaaggttgagtgaacggagacgacggagagacggtaaaggtcaggtggccgagtaagcggcgattggagaggacatcgcaatcgagtgaaagagagtcggtgagagagatggcgagtgagatttggtcgagtgagagttgtgagggagagatggcgtcggtgtgaagagatgaggttggatcgagtggctgtgatgaagccttgggatttccttatcactaaaagggcgtgggggggggggacaaaaaggagagaaggtgggacgcacttggtctgtttgtcctgaagcattgttccctgttgactagaaccttctgtaatcctctgtaaacttgttaaactccctccaagtctctgtagcttctgttggtcgagtataagtataatttcaaaattttggtttttaaaatcatcactaatactcgaccaacttactcgacctcatggcttctaagtgcaacaaaagtttttcaaattcttgaatttctcacatactcgatcccttgttgctctgtagagtaaattttttaaatttttactctacctccacgctgtttctctgttcctgagaatcacaaacacaaccaaaaacaaatcaaaaataaaaagaaaataaaagttttatttacagaaacagtcttgggaattcctcccaagtgagcttgtttaaagtctctagcttgactcctcacactcattaagaagaaaatgggtgatagagaggatctgcatagtcctctctgatctcatcatcatattcagcatcctctcttgagagatgcgtagaagaatactcaattcttctttcctcgaaataggcctctttctcttctggtggataatttatctcctcagaccgtcttgaagtaaacttttttctcgggatagtatcaatcccgcattttgattgagctttctcttgcatctgatccaatttactcttaagttcctcaactgtctgagctagattctctatggtttattcttgctcatcaaatttctttttgagatctcgcaagtcaggtgtagaggttgtgcttggtctggtgattgaatttgaaggttgaggttgagccctgatcttttcttctacagctgtcctttgcaaagtttcgttgttgtcaaactgcagcttgatgtgcttcccaaggttgagacttattctcccgtctttgacatctatcatcgctcccactgaggctaagaaaggtctccctaggattagaggatccttaggttttgcttccatctcaagcacaacgaaatctgtaggtacttccactccattaatctttactggcagatcttgtagcaggccaaagggtttccttgaagacatatcagcaaggatcaaagtcatgtcgcaaggcttgtactgagtgaattccaacttccttgccacggagagtggcattaagcttactgaagctcccaaatcacatagacaattgctgaaaaccaattgaccaatggaacatggtagagtgaaagttccaggatcttccagtttttcttgaacactcctcttaacagtggccctagacggattagcattacattcgtcttctaaatcttgataaatcttgatcctttccagaattgactttctcgtatctttgtgaggatacgagatcaggttgtgaacttctattagaggcatcaccgcttccatctcatcaagctgcttctctgcaagagaattgtatctttctatccatgctttcctgaatttccatggaagagcacgtgaaggtaatggtgctggcttgaatcgttttaccatcctctcaatgatggttgctttctcgtctaggttggactgagtttgaaaacgggatccaactgaatggtcgagtccaacaactgaaatttcaatatgagtagaagcctccctgtcctgaacatcactgtcctcagcgattgagttggagacatgtcgagtaggcagctctcgatcatgacagatagtgattgcgtgagcagtggcgtattctttcgggttttagattgacttccctggaagtcctgttacttttggagcagaggttgatgtagttgtctttccatgtatctgaccttagaggtaaatgcctcaagtttgatattcagattgttgaaagtgcaatcaaccttgttgtggatttctgccatcttcttggcgagatccattgctcctgctgcttgttcctggagaatctgctgtaacatgttcttcaagtcagaatctggagttgttgaagctggttgttgttgctgctgtgtgaacccaggtggtggaagttgctgcggatagttgccctgatactgctgcttaggaaaatactcctgaccttggttgtatggaacaaagggcttgggttgattctgctgctgagaggggtagacttggtcctgcgggtttgcaatatttgtacttctgtaagacagattgggatggttctgcttgaagttgttgaaaccattgttgtaacctccttggttttccacatagctgacctcttctgactgcagagtctccccatcctggacttggaacgtctcatcatcacccagaaaatgaatgtgcttctgttgcacaaggagtagcttgtccatttgtcattcatagctttcatttctctgcagtgcttctcatcagaatcagagctgtggcagatgcttctatcgtaatcttcattgtagttgccatttgactgagccaagttctctaccagctcccatccttcttcaacatctttgttgaggaagttcccgttagaagtgttattaagaagcatcatgatcttgggaaggacacctctatagagggtgctgagaagtgaagctttgtagaaaccatgatgaggacattgtgtctggtaacctttgaaacgctcccatgcttcgcagaaagtctcattatttgtctgtgtgaaaccggaaatatcattccttagtctcgcagtcctggagtatgagaaaacttagccaagaaggctttcttgcagtaattccaggaggtgatagagccttaaggaagcaacttttcccactgatggggtttgtctccaagagagaatgtaaacaatctgagcttgaagccatcctcactaactccattgatctttgttatgctgcagagcctatcaaactcgtctaggtgatcgagtggatcctccatagggaggcggtggaacttgttgctctgaaccatggcaatgagaccgctcttgatctcaaagttgctgttctgcactggtggaggcacgatgccattacgctgattgtggttgtgtggtgcatcacctgcacctatgttttttggttgtacttgctcatctaccattgtgtctgttgctgtttgtgttctgagttggcgtgcaatacggtagatgttatctttgaataggagattctgatttccttgtgatcgtgtttgcatacaacgagtaccaagtggtgaagctggtgattcgcagtacctgaatcaaaacagacaaacacaaaaaacacaaagttagtaactttcagtaaaaatgaaaaagaacttgatcttaagtattctacaatctcaaatatagcaaacaaacatccaattggcaacggtgccaaattgataatagttttttaatcaattaatcctatagcactatcatgtcgttgtagtacttagggtgtcaatccaaatgggtgtgatgcaaatagatgagatgtgatcagaagtcactaagtcaagccaagcaataacagtgttggggttcctaacagtcctaagcgaacatgcagaaaacagaaacaataaatgaattactaaaatcactcgaccacaacaggctgatggcagaagtaggatgtggtcgagtaacaggtcgagtaacagacaggatatgaaccagctatactcaactgcatagtctgttgccagacactgggtgtggtcgagtgtactggtcgagtaatagacaggaaacaagacaactatactcgattgcacagtctgttgccagacactgggtgtggtcgagtaagttggtcgagtaattgcaaaaactaagaaacatgcaatgagaacgattaagcgataatgataaaacagagaaatcagatagacgagaaattccaaaggatggggtaatcgaatagagtggtatcctagcctattcgaatggttaacaagcgcaatcaagctatccctaaacaacaggttcaacaacagatcaattcactcccgtgatagaaatcctcaagcaaagctagcccagactaattcccattaacagaatctaactatgcaggcaataagaacagactgataaagtcaataaacgctctaaacggtcaatcccttgggatagagacgaatatttcaggaactagtggatcaagcattccatcgaacaccttctgggtgcgggaatgcttgggatcgaattccagttgatcagaaagaaataagcagtaaacacaagtagtcctgaagggattcaatcaattctaaaacttaaccattctacagactatggattccacaactactctatcccatccttaagaactctatgtcactactcagataacatgctcaaagacataaacgcaggtaaatgataatattgcaaaagtaaagagataaagagtacatgacaggtgaaattaaatgcggaatctgaataacttgtaaaagtctcgaattacaggttgcagaagcaaaagcggcgcagccagagtaaaacagaaaataaaactgaaacaaaaactcaaagtcgactagatttctcggacagaaccctaagacatctatttatacaaaactaaataaaaagatagtagacgggccaataacctaatcgcccggcccatagagtgataatgggccgagatgggcttcgtgatccgatggggctccaggccgcttccaaatacttcgtcttctcttccttgtggtcatcttgtctggttgagtgcaaatttgagtagactccaaagatgtgatcaagtgcttggtcgagtgatggtgttcatggtgagtgatgatactcgaccagggggtcgagtaacgtggtggagtgaacgaccgagtgttatcaggtggtgtggcaaagtgatactcgaccagggggtcgagtaatgtcatcgagtggcctgagctgcggttactcgacctgagggtcgagtagatgggtagaatggctccaaagtcactcgaccagggggtcaagtattgtgctcgatgtactcggcctgaggtcgagtatgtccttttggttctggctcgcttcttccaatttgctcgcaaacagctccaaatcacctgaaaaaaactcaaaaatgcaatatataggcaaagctatcctaatcatgcaaagtatgcaagaatgataagaaatgatataaaacagtgatgaatgatatgaaactagactcaaaatgataatgaatgaacactgaaaacatgcaaattatagacatatcacgtattcgtatccgtgtaaaaagtagaaaaaggtttcaagtaacaaaatagagagtagcattagcagtaaaagattcattaaccacccagacttacttcacactgtccccggtgtgaaaataagcatagggatgattcgtgagaaagataggttaagaacaatgtcaccttgttgtggtgactaaccggatgatctctcgccttgcttaacatcgaacttactcggcttagtatagtcgaattccatgatattaatctccattcacatattccttgaaacaaaaacctaaaaccaccaatagctttaacaaaacaaaataaataaaacatacctaagatagagtttatcttgtttttgtcattatggcaacgaataagatcaaatttatggtaacggattgtgtgaatggatggcgatgcagttgcggtgcttggccgaaagggtggagtgggtggatatataagcggtcaggtgttggatggtgtcgattgtctttgagatgggcggaatggttcgcaggtcaaacgaatccaatggctggcctatcggccatggcggtgcaacttcccctatccattcatgggctagacatagttggccgagttttgggtcgcccggatcggcgggcagtttcttgcccaggccgacaatcttgttccgggcggctaggtgaggcacctctggccaaagggtggcacagtcgggcggactccgaccaaagattgacacggtcgggtcggctttttcaggtgacactggttactcggatgagtagccaggccggttgtcacgatgccaagtgacaggtctatgtgaccttcttccttctcttttttttggcttcttctgtttctatttttctcttttttttggtgtgttttatataaaactgaaacaaatactaataagatcaaaagcaaaagcaaaatttaaatcttaaggaaagtatttacctagtgggttgcctcctactgaacgcacttggttaacgtcgttggttcgacgtttgggaaccagttaggttcaatggggaggagcttcagggatcgcttctccttggcgtccttgatgtcttgataccctgcccttgcttctatggtaagtttccttctatatggggttttagaaaccttatcttgtaggaaaacttcttcaatgcgctttatcatctcttggatgtgttccttgcttttcttaccaagcttcggaggaacgctcatcttcacctttgagattttaggcaggtcgggcggttaggacggcagttttggggcattcttgcagattacacggttgcctttctcttccttgctgatatcgggaccaacaggatcataaggcagaggactcagggaggctggaaccgtcttggagatcatcgggtagatgactttcttgttaaccttggtgaatatgattttcttgcagttgtggtcaatcacggcaccgacggttgcaagaaagggtcatcccaagattaacggcttatcaatctcctcatccatctctaaaacgtgaaagtcggtcgggactaaacaatcccctaccaccagccgagggtcgcaaactaatctgtcgggctgggatgcatctccgaagactagactaaggttggatggagataaatctcgcaatccgttcttctcctctacacttcctgacattaagttcacattagtaacaaaatcacaaagagagtcaagaaattcaatacctattattgagcaagagcagacaaaacgtcccaggtcttcagccttggtaagcctccgtaatggttagcattcgggcttgaccttgacatcctcttatggtttgcaggcgacgtcctggtcgggtttgacgggtggaactcaggacttggcttcatcgacagaggtttgggcggatgccaccgtgttacaaattcccttaaggttctctttagtcctttctgggagtgtgttaggttgccttttgaccgactcagagttctgcactatttgagtctcgagcttcttcatatgcgtggtaaaacgttcaaactttccatttaatcaaagtacatgttccccatccgcactttcatagcttgacttgcctttcgattctcgttcgtcatgtcttgtatcatcatctcatgcttagtttcgttagatggtgcgggttcggtgggtccagtctgaagggcgcttggctggaagatattggtgttgtagttggcgttttgaaatcgcccttggaaaggtttcaccggttggtagttttgatcttgagggttctcaacatttgggttcctataagagagattagagttacctctaaagttgttgttgaagttatttttgtaactgcaattctggtagaatccttgggctccaacatagttcacttcttcttcttgatcaaatgtgtcattgtacccttggaaaacttccgttttaccgaccgtctcgcatgcgtttagggcacggttttgattcttcagaagttgggccatcgtgttcttcagttcgaacatcttgtttgagtcagagtctttagtatggatggttctatcaaaatcagtggaagcatttctgttgctggtcgccaaattctctatataggcatgtgcatcgtcaacattcttggttgtgaagtcgccattgctagccgtatcaagaaagagttggaacttggtatgcagtccactataaaaggtacttataacgttaccttcgaggaaaccatgatgaggacaatcgtgttcgtagtccttaaatcattttcatgcttcatagaaggattcgaccggtctttgttagaatccttgcagcttgttccttaaagacttggatctggacttcatatagaagtgatttaggaaggctaacttacatccttcccacaaagtaatcgaccgtggagataaagactttaaccatctaatgtccttgtcggccaacgagaaaggaaaaagcttacacttaaaatagtctttacgtatcccatgggattgtgtagtactgtagatttcttcgaagaggttgatatgatccatcgggtgctctatgttcaaaccatggaatttgttttgcttcacaaggccaatgatttgaggtttgatctcaaaatcttgccttagactaggtactcgtatggcagctcaatcctgagggtaccggttaggtgcgtcgtaattgactatcgtacgttgaggagcggccagtcttattggtggaatatatgtcggttgcctaggaaaattgggaggtcatggaagaggaacatttatgttttctccgacgcatagagggtgagcttcaagatactctcggtcttgtggatcgacatgttcttcggccgcctcgtagatggggttgccatcatcatcgtgtaagggttgtccgtgctcacctaaggccggaacttgttgcggctgatacgcagggagaccttaatctcggttcctttgttcggccatgattgttgtctttgaagtcttcggattttgtgttccagttgacctatgtcttgatatggcggtacaccggagtttttgctctttgtcatgcacctgcagatgtcaaaaaccaaagctagaaggggaacaagaagttatcaaagtagagtaagaaagaaagagaataagccttgagcttaaagtgtcttgacaggaggttagcccctgcaacggtatcttgaatcactccccagcaacggtgccaaaaagcttgatgcaggttttctttcgccccaggcttttacctgaaagaccacacgactcatgcgagtgcaaagtatatcagagtagtatttaaggatcgaatccacagggagtgtagctacaaggaagaattcaagttaggtaacctagatcaagacaaacgaaacagtggaggttttgtgaatgcagtgaaaataagtaaagaattcaatggaaataagaaagcaatggaagttaactataaaaaggcaataaaagtaaatgtcaataagaagagtgatgtaaaactagtaaaacaaaacgctaggtcttcggggttttcttcgggcatcatagtttaacataaaggtataaatcccaatctagatgataacatggttaggtttgtttacttccaaattctcggacataggaaactcactaacggttagtatgtggaagccggctattctcactaataccactaataccttgcgtactcagtttccctaacggctagtaggtgataacatggtttcgagatacaagatcaaaacattaagttcaagttcgattctagtccataagtccctatcactcggcgggcgtgcaacggttatagttctttattcagttgagttagttaaagcaattatacaagattcttccaagtataaactacctaagatcatgtactaggtggcgttccggacatacatgcatgaagattaaattcaaatagaaataatagtgtaaacgatcaaataaaaccataaaaactgccaacttaaacttgatctaaagtccccatgaaaacccttcgaaacccctaaaacctaactagagatctattcacacatattcaaagaacacaacatcatatgaagaagaaattgcataaaaagaaaatgagtatgaaatgggtttagagatcttttctggaaatccaaagcttgatgaatcttcttccttttacaagtagagaataaagaatagaagagaaaagagaaaacaaatgaataacaagaggaggacgacttggaggcgatgagaggcgcatgaggcagcctaattttgtgggttctgattagggtttccccttatccttgtatttatagggcttcattaggtcaaagggtagaaacgtctttccattaattagtaagtgatgggccaagttcctgggcttcttagggagggttgaagttggcggcaagaggaagggaaggagtggttgtgcgccgtagtggtcgatggaatacttgaggggacgtcagggttcaagtctcttcggccgacaattttaaattgatcatttctaaaaccacgattctagaacatgtcttcactcttcgtgccataacttctgaacggcttcatggattgctttgattcgacttcgatgtaaatattgactcttctagctttcctatgacaccgagatacctccatgccaagatcgtaaagaccttaaacggatgccaaacatctgaggcacaaaaactgttctgaaacggaattttgtcgatttctactccttttagcatgaaaactcataattcttccttgaagcccaaatactcgaagtatgccttgaagtgtcctgtaactattgatttctccatggaaaacccaataaaaaaatagtaaaagttggagaaatacgatgttatcaccatgggggactgcaaccaagattttaatgttttgaagaatcttagccgagcttagtaacgagggcttgtaacacaagtgagggcaagtggggaagtgggtgagttgtttcggagaaaactaaggaatagtgagaaaaaagttgaggagatttttggaaaaagagagtgatgagatgcgagttatggagggcaagagccgaaggtgtaaagattatttctgaagaaggaagaaaacaaaagatcaatgagatcatttggaagaatgaagagaaacacctattaattggagtaaggcatgagggaagtgaagaagccgagaagaagcaagtgattggaaggagagttattggagttcacttaactggagagtaaggagcacaacaaagaagtgggtgaagaaaagattgagtatcgggggaggaacaatttaagagacataggtgatgatcaaaaatcaatatatatggtgagtaatgatggagttcaagaaaaaagatggagtaaattttcaagatcattataaagggaaaaggaagcatagtaagacaaggtgaggtgaatcaaaaactgagaaggtgaagtttgatcaaaggaatatatgttggtgtcagatcctgaacctaaagtccggacaacccaaagattgccacaagaggtatggcccaaaagaaccccgaagtgaaggaaaagatgtagcgaggtgtctatactacgagatggcgataaggccgaattaaggacagttcgacttggagatgttgggccggacagcgaagcccacgaagatcaaagtcaattcaaattcgaacattgaggcattaaaacttgaagatcgtaacggaagcattaaaaggagaattatggtgtacaattaagattagataccatgctttagtataagtaagagaggccttgagccatgtaagggacatgcaatttctagcaatcttactatagacatttgaatataaacttacagcttttacatttgatttttgtcctcaagaataatccttctcacaaataaatatatactttgtgtgaatccgacattcatattttggcgccgtctgttgggacagaggattcttgagtagtaagattttttttcaccacattttcgagacaagcagcaatggccgaagaaagtgtcatcagtgcatcactgggccaaaatactcaaaatcatgcagcaaagcatgtcagacataacgaaaaagttctaagatgtggagaaagttgttgacacactacaaaaaaaccaggtatctcttagccagaacgttagtactatacaatcttgtattcggtctttgggtgtaggaaaccctctaggagttcgaagaagcatgtttagttcgcctggctcccacacgatgaacggtaccagtggacaaacaaaccccgattctgttaataaacaaattctgccggaggatactgcaaatcgatctagaagaagtcgatgaagatgcatggtactacaaggttttctctgaaaacctttgcggacaggcgctgatgtggttcacacagctggaaccaggatctattggtaattttaacgagctgtcagccgtgtttttaaaggaatattccatccttatggataaaagcacttcggacaccgatatatgaaacctgtcgcaaggaccaaacaagtcacttcgtagtttcattacaaagtttaaaggagtgctctcaaaacttccaagggtgtcacactaatccgcgttatcggctcttcgaaaaggattgtggcatgattcgagattcgaagaagatctaatacttcagttagtgctatcaaaaagcataggcgaaatgttctacttaaaacaagctgaagcgaggaagtctattttcaaggtgcctcaatctcgttggaagaagaagaaacttgtcacctcgaaagaccgcatgatgtcgccttagtcattaccctagatgtcgccaacttcgaagtgtcaaaaattctcattgacacgggtagctcggtagacttaatttttctaagcacattggaaagaatgagaattagttggaccgaagtgatttggcacccatctcctttagtagcatatacaagcgagtgagtcatgtctctcgggacaataaggttaccagttctagctgggaaagtttcaaagatcgtcgattttgttgtgttcaataggccatcaacctacacattatcctgcgaagaagggaattgttctggaagcgtcacgaatatgttatttaacttgccatcggatgaaggttcaatagcaattaacgaagcctgcaaagaagggaattgttcctaggtttccaagcagacaaaaagtagatgatgtcatggttgaagtgacactggacgaagatcaacccgacaagagagtttgaattggagcaacattgactgacgaactaaaagaagctttgttgctacttttgaagaaaaacaaaacctcatttgcgtgatcagcggaggatatgcccgggatagatccgagtataatttgccacgagttgaatgtagatcctagtttcaagccggtaaaacaaaagcgaaggaagcccggaccagagcgtacaaaggcagtaaatgactaagtggataaactattaaagattggatccataaaggaagtgcaatatccggaatgggtggccaacatggtcgtagtgaagaaaaagaatggaaaagatagggtgtgaatcgactttacgaatcttaacaaggcatgcccaaaggacactttcccacttcctcacatagatagacttgtggaatccactgcggggaacgagctactaacattcatggacgccttctcgggttataatcaaataatggtgaatcccgatgatcaagaaaaaacttcatttaccacgaatagaggtatttattgttacaacgtaatgcctttcggattaaaaatgtaggaacgacttatacacaactggtgaatatgatgttttatgaccacctcggaaaaacgatggaagtttacatagatgatatgttggtgaaatcattgaagaaagaggatcacattcaacatttaaaagagtgttttgaaattcttaatcggtaccaaatgaagctgaatccggcgaagtgcaccttcggagtcccttcgggggatgaaagatgtgaagaagcatttggacaacttaaagcatacttgactacccctcatgtactatcaaagcccgaagtggatgaaaagctatatttgtatgtgtcagtatcaaatcatgcggtaagcggagtcttagttcgagaagatcgtggagagcaaaagccaatttactacataagcaaatcgatgacagatccaaaaactcagtatacaatgatggaaaaacttgcactagcggtggttacttcagcgcgaaagttatgtccgtatttccaatctcacccaattgaagtattcactaaccagccattgcgaacgatactgcacagtccataccagtcaggaagattggcgaagtgggccgtagagctctgtgagtacgatatagagttcaaaagccgggtaagtatgaaggcacaagtattagctgatttttgactaagttaccaatgctcaatgcaccggagcaaccggagaatcaaacttggaagttacatgtggacgaatcttcgtcaaaacaaggatccagaataggaattaagttggaatcacctactttggaaatcctcgaacagtcattccgcctactattcactgcctcaaataatgaagcagagtatgaggccgtgatcgtcgggttttgattggcacaaagaatcagagctgaggaagtaatcatttattgtgactcgcaactagtagttaaccatttcaatggagactatgaagccaaagattcaatgatggaagtacatcttgaagtggtcaaggatttattcaaaaaaatttaaaaattcgagttagtctgaatacctagaggagagaatacaactgtagatacggttgccgcattggcgttaacatcggattcttagttgaagaggatcatcccggtggaatgtatcacggagaggagcatcaaagaaaaaaaaaacttattgtcacgaggtcttgtggggaagaacatgcccgagctgaacctgaagtggaattgccacctatcaagaaaagaaaatcaaagaagtcaaacacgtatgaatccaaaaggattcaggataaacttagagcaaaataatacccggcaaaacaactagtaacttacttgaagagcttgtcgtctcaggtgaagaagtaattctcgagcccaacgaacatcctgaacctgaaccgcggatatttcacaaaacaaatcaaaattacgctaaggattggagggagccaattaagcattacatcttaacaggcgaactcccgaaaaacaagtggcaagcaagaaaaatgagaatcattagcgcaacattttgtctagccaaaagtgcattgtacacgcgaggtgtcagtgacccttaccttctatgcatttctggatccgaagtcaaaattgtcttgagcgaagtgaatgaagggctgtgtcgaagtcatttgtcgggaagggctatgactttcaagatacagagactgggatattattggcatactatgattacagattatgttaagttttcccaaaggtgtaagcgttgtcatcttcatgcactttagtccatcaaccttcggagttgttctcttctatctctgcctcgtatccgttcatgaggtggtcaatggatatcattggaccattgcataagtcaacctaaggcgtacaatatctcttaattttgacggattacttctcaaactggattgaagctggagcatatctcaatatcaaggattcaacggtgaaaaatttcatttggaagaatattatatgtcggcatggtgtcctgtacgagatagttactgataacggaccacagttcaattcgcttgagtttgaagctatttgtttggattggggtatcaaagttagttactccaccccgccgtatccgcaaggaaatggccaagccgaagctgcaaacaagactattttgagcaatctcaaaaacgcctaagtcatctaaagggaggatggtatgatgagcttcaacccatttagtgggcttaccgtacgactcttaggtggtccacctggaaaacaccattttctttggtatacgggatggaggcagtggttccggccaaactcaacgttccccgattctgccaaaccgaaacacctttaaacgaagcagaaaactcattaatgctcgacgattcgctagataccatcaatcaacggcaggattaagctttgatacgaatccataattatcagcaagcggcagcccgatattacaataccaagattgaaagtagacctttctttgtaggagattatgtcttgaaacgagtcttcgacaatacaagggaagaaggggcgggcaagctcagagttaattgggaaggaccctatatcgttaccaaagtggtccgcaatggtgtttatacgctaaaggacttagaatacagaccagttcaacggccttggaatggggaatggaacaaggttaaggcataatttatagaacatattatcccctgaaatccgtccattattccaaaaagagtgattggcagagaaattcacgtcgtccgactgatccttcatttaaacacatttcccaaaatctatcgtttcaaggaaatattaaaagtttccataaataaacatagttcaaggacatttttgggagaggtcaggaatatggtccttcatcgtcggttcagtaatcgaagtggatgcctcgttcttttcatccaccttggattccgtcttgactcgtttcaaagggttgttatcctcttcatcttcatcctcttcgctaccggaggggagcactttggttgtacgagccacgggtccgtgaactttaccttgactacgaagaaacgtctggagcatggtcgcgttcttagcaacggaatcaaagttcctccattcccactgaaagtgattgctctccaaggccctcactttcctttccactcgggcgatgcggcttctagcgtttgccttttaagctccacacgctccctctcctcgcatacatgacgatgcttttcaacaaccttactccaagagaaacgaataagggtcgaaagattctaagaggagcagtagggtttaatgcgattaccttttcgatgaaaccatacgcctctttcttatcttttggcggaaagtggaaggcagcatgaggagataggactccggatggctcaaaaccatcaccagaacgtaaagagggctgccgggatccacgggacaaacgggggtcgcaattttattgtccatcttcgacgtatcaaggagataaatttctgagatcattgttggaaggaattatgaacacaataaggactttatttataggaaatttagggttaccttggaactagaaaattaataatggcggcgtggccgaatggtttaaaccatttttggaaatcgaggaagttcaattattgccctaaggacgtgcaatcttttcaatttctcaaggtacaaaagtaagccgtcgcattaaagataaagcctattaatggccaacgaaacaagttgggcccaagcccctaaaattatcgagttgactaaactcaaagtgggaactcgcgttaagccgagcaaagttatcgcattttacaggaaaggccagatcatccaattttctcaaagtataaccacaaggtcgaaatctaagaatgcagactccgccaacccgcatttcattgtttaaataaaaaaaccttttagggatcgaaaatttgaaaggtttaaagccttcctcaagcaaacaacttgttcaaaaaaaataaaaaaaataataagcctccataggcgaagtgaacttgctcgaaatttaagttttcaaattttttgggacacacctcaattttgaagtagacacggttactatgggttggcagccacggctagcgcaacgtaggatgagtccttggtaggatcttgttcagaacagagttccggcccagttttgatggtgtggccatcattcagagtcattacctgctcatcgttcgcaactagaggcacttcgccttgagcagcgctaggttcaaggatcggtgccggagtgtcaggcacctcgggctaaacaggttcagccaaatcgcttgaacctaagaaaagtagtcaaatcaatcacaaggcagatatgtgataagctttgaagaattccgcgaagtgctgggataaaaagaagacgtgggaagtgccgcaagacgttcttttttgtctttcagattgggctctagtttgaatctctcttcttcctcggagaagtcatcctcataagtctggtccaataacagcaggttgcgctcgtattccttgatatcagattcaaggtcagttcgggctttttccatctgaatgaaacggatggcaccctgaatcaattccattccatgacttttaacttcttttctggccctcgatgctgactttgccaatttggagtcccttagcttgaccaatgcgtgatactttaggttgagttcggtgagttgattgtgcgagatgttagcggcctactcggattgaagaagtctgtcttgaactctcgacagttctctttcgaagttgtcatacttgttgtattgcgcctgtagctcatcatctgacttattgagctcatatttgaagtggcaacctgatcttccatctcgtgtttcccttttagagaattcgaaagggcgtggtgatcagcttcgagggaagagatctctccaggcccttgtttcgttttccctactaagtagcaacccttcataatgctcaatcatatcattgagtttcattgagttcattactcgcctgaaagagggttaaagtcaaagaaggattagtacaggtggtggtaattacaagaaaacatcgtgtaaccgacaaacaaaaccgttgataatccgtcagttaaggccttaaccgacgatttacagataaaatatggtcgtcggttctagagcatcggtaatacaaattccatcggtattttttcggggagctcgacggattaccgacggttatattcccgacgaactttcaacgaattaatatcgtcagtaatatattcgtcggtattccgtttggtttaagactgacggttaaccgagacatggctgatggttgttaccgacgacgaaccgacggttatattctcgacgaactttcaacgaatcaacatcgtcaataatatattcgttggtattccgtttggtttaagactgacggttaaccgagatatgactgatggttgttaccgacgacgaacatgtaagttgccgatgcatttttgtgccgttattactgagggattaccgacgatgatggaaaatgcctgacgaaaacaattgatttataattgatttaacaaaaagaaattataaattatgcaaactaaaaataattaaattttaaaatgattcaaaataaaataactaaatggaaaaaccattcatattacaataacattgtatccaaaataaagtattcacactaaaatttaaaagaagaactaagaactagaattgggaaaccgcattcgcatatcttccatgaaacgcatcatcgtctcggaacttttcttgttttcggctatctcctttgccatctcatcggttcggcgcttgttctcagctttctcttcggccatttgagtctccaaagcttcaatccgtgcttctttctctttgagagacgcctcaagcatgggatcacatgaatacgacgatgtggaatgagacttatatcgagctacacctagttttcctaacccaaatatctgaccctttctttttggagtttcctacaagcaaagaagatataatagtatgtatcaaaaacaaattatataaaatagtagaggagagacgcaacatagatctatatggcaacaaaatctcaacataccaatcaaatattctttaatctattatgagatagtaattaaaaaaattaaaaaacataagtacctcaaaaacgaatttgttgacaatctccattgggactacactattctcgacaccatctatagatggttgggtaaggagatattcttgcttcctcttctttgaattctctacaacttcctttgcaaccggatcttgaatttgtttggtttttttgttggtgtgtatcttccatcaacgttagatgatccggatacacaccatctctctcggcctaaatccaaaattaaaaaatattaataacttatattgaatagaaataggaataaattgaaatttagtacgtttatgaaacataattatggaagtagtacactcactatttataattagggaaataaccgggtccactttcgactgtaatacgcgtcccctgtaatacagaaaaacatgggccatgattcgtttgagaaaattacgtttaggggccgccgcttgttttggtcgttggcaggaaaccttctgattgagttgggggttttgctttacaatatacagcaaacgtcatgggcctagcgtatttctagatgggccttaaacaaagtctgttaacagttttataattcatggcgaaggcgttgaagttaacttcttcatcgtcggcttattcagttccggagtgggagctgagagaaacgtctgcatttatgaatgtttcaaatcaacggaattagttaacaggttggtgaataaaatgttataataatcaaattctctttaggtttttctcgaaagtagctaaattttttgggggaatttgagctcgtttttttagaggattagattatgtttaagtaacaaaaagagatgatgattatcagtttcggttgtgtttctttgctacctggaaaattcatctttgcgtttctcctatggaaggtggaattctaatcagaaaatggttttgtaaatttctcctaataatgtttaaaagccttcagtctgataaaaagtgaattccttttttgcagtggatgatattgtcgttgtacaggttggtagatggattttgtatagcaccggtgaatgggaattcaagcttgattcttgtggtcacggtagggcgatgagcttgatggggttaataactttaagggatttagagcttaaggttcgtcacatctttgggctggagaaaccttccatatctttggagcttagctacatttcgaggacagactagctctgttatctggtgttcagccgggtccgacaatgattgggtatgattggcagtttagatgctttaaatctctaagtattggtgataaatctgtgaatctgtttgtgtgttttagagaaggcgattcagttatcgtcggtcctgcctgcgaacctggacagactagcgcaagtgttgttaagtattttgaagctggagaaccaacgtttgcaggcattgtacagtctatagataaacctgttccggcagttggaggaggttactttgcggggttattatctactgttcaagataatatggatgcccagcctcccaacaatcactctgcttttgttcagagtacagccgtttgtgattcatccagtcaatgggacataagcgatgaacttctgttagaagccctagaagcagtggagaagtctggagcttttgtcaccgctgcaggggtggatacatccctaccggcagaagtacctgattcaggtgatgattcagagtctttagcagaatctgacgaatcttcctctcttagtacaggaagtgactcagaagtttctgagttcgacgacgataccctccacgaaaacatcctccaatctgataaagagattgttgtacacaaagacatcggggatgatgatttcgttgagcagccccccaaaaagaaagtttggcttcaaaataccaaccctggtgctatgacagatcttttagaaacttgtcagaaaggtataagcattgatcaagtgtatgggtacgaagatctcgagccgatgtttgggaacgatgatattgaagcaaaagcagcttacgttgatttgacaaaagaggatgacaatatgtttgttggaaggacctttgcatcgagggaagatttcaggattgccttgtccatttatgccattaaccgtattttccgcttcaaatttactaggtatgagaaacattacttggttgctgaatgttatgacaaaaaaactgtgattggagagttagagcacaccaagttggaggcgaaagcgaagaatatgaagtgaggctggcaaagttggaacatgtgtgtaaggttcagactaggagccgcttttcaaaacatgctacgtccaaggttgtagctgctctcctaagagctaagtatgccaaggccttctgtggtccaagagcaagagatttacccgactcaattctgagggatcacaatgttcggatgacgtactggaaatgttggaaagccaaagaattggctgttgagacagcttaaggcactaatgagagctctttctctttattgccggtttatcttcatgtcttacaactagcaaacccttgcacagtttatcatttggaaacagagttggatgatattggggatgaccgattcaagtatgttttcctgtcattgggggctagtgtaaagggattgaaatatattcggagggttgttgtcgttgatggtacacacctttttggtaagtatcttggttgtcttcttactgcgagttgccaggatgcaaactttcagatttttccaatcgcctttgccgtagtggacagcgagagacagatcattcttggacatggttcatgaataaactctcagaaataataaaagatggccctgacttgacatttgtctcagaccggaatcaatcaatattcaaatccgtcggtcttgtgttccctcaagcacaccatggagcttgtttggtccacatcagaaggaatgtcaaaggaaggtatggaaagaagagtggcctcccagctctagtgtggcaagcaggtgacgcattttgtctctaagattttaatattgttcgtgacaggataaaaaaaaaggagtatgtcctgttggaattacattgaaggaatgggtgttgcgaattggagtagggttcattttacgggagagagatataatttgatgtctagtaatattgcggagtctttaaacaatgcgttactaccagctaggggaagccccgttgttgcattgcttgaattcattaggaaaatgcttgctaggtggtttgaatctaggaggaaaaaaatatccagaacggttggcgacatacccattgctgttgaaagggaacttatgaagcggtttaaaggtgctttggggatgtctgtttcggctgttggcagttgggatttcaaagttgttgcaaaggacggtgagcagtttcacatctctttgtaacagcagtcttgctcttgcttggagtttcaaacaattagaatcccatgtgcacacgcaatggctgcgtgtcatgataggggtttggaattcagaaccctggttggagagatgcataggctcacaatgtggtcaccaacggtccaagctccaatactccctgtacgcaatccatcggaggttgaagtccctcaggaaataaggtcactgtgtttaatgcctccccaaacaaaaagacctgctgggagaccccctaagttgcggattcattcggttggagaatatgaggtcggttacatctttttcaacaatgtatttctatataatacaaaggcaacaatccttttccttttgcatgtagggaaataacaagtctaaaacccctaacaagtgtggacggtgtgggggattaggtcacaaccgtgttacgtgcaagacccccctcggatgatgctatttaaagtttgaaagatttggctagttttttgttattaatcaaggagcttttttcggtgttgtttttgtttttggcatcggggcagacatgtttacccgatatgttttaacaacattctctaattcctaaacatcttttggagttgcaagtattactgatgaatggatattactttttgtgtattattcaagtagtatctggcgaggtatttctgttcaatcagttgtttcacatcttcaccaatcgtttatgtcatttaggtatacagataacgtagtacagtttttacaacgtacagagatcccccgtataccttttttactgtacagatataaccgtacagttattacagcgtacagatttcaccgcacacttactaagcgtacagattgcgttttatccgtacttatagtggtgtacagatagcggcgtacacatctcagtgtacagattgttcagtacagatagcggtgtacagatagcgatgtacagatagcggtgcacatatagcgatgttcatcagggttatgcatattgtctaattttctttcaaagtggcatgtactactaatgacttgataccttcatagccttattggtcatgtatttttgtttaaattttttcaaactctaccgattgcagcgtactgatggtggtgtaccgaaatcggtgtacagatttcgctgtacagtttaatttttactattacttagtgagcaattttaaagagtaggcatcatgtcattaatatgttttggtttgaggatgtaattattctcaactgtaacttttccaaccactactttattgtggcttttatattcaattaacctgcaataacattgtagaagaagaaaatttgtctttgtttcctctcaaaggctatccacaaaaaaatggaaatagaaatgcccgatatccctgacgatctgttggctaaaattgtcaagctcgtggctgatgatcgttggtggttgctaggtcctatcttgaaggctggccgaaggggaagagatatggtgtacaaagatgacgttttaaaggatgcttgcatctactctctctgttctgatccaagcgatttgtactatttccgtcctttctttgagagatgcctcaaagctggcaacaaaactgccatctactatgaagggctaagggtggtggctgaaggttgtgacctcaatgggggtcttgaacttctggctcagctggtcccagaggatggcgcttcaacaatagcatgtggcattttctccatgtgtcttgggaatgaggctatggcggtccactatctagagcagtttgggattttccacgctcccttaggtacccaaagggttaggctatggggagaggagttggtcagagatttacggccatatcggaggataagccacgcttcttaccggaaggcgttcatttatccactttgcaaagggatcccgtcgtctgattgtgccatggattgtgctcttgcttcaagcggttatgagaacttttgcaacgattgttacttatggtggttgtcaggaaaggtctgtcaaatggtctgaaggttttctccttgtttttccgtattgatcaatgtttagattatattatgactatgcggatgtaatttgtttttgctttttgctgtataattatagtccttcagctattatctcactatgttgtttaattattgtattaagttgttttcgcctttctggatgtataatatttgttttttgtattatttatatatatgttcttatttttcgaaagtttgtcatgaccttcatctatgtcgtctgtatgtatagtatatatttcactagttttgctttacgttctctaaaataaattgttctctgatgttcctaactctgttcttctccacagatgaacaagtttttaatatgtgtcaataaccaaagaactgatatgttgatgatatgattggaacttcaacacacaccttccacttgcatttccttggatgcataaatgattggacatgtatttaaaatatatgtctatagctagtggtgcgtctttctcctactgacatttataatttgtttttgaataaattataagctcaatcatttcattattttctcaccatttcattttgtgttgagacttggatatgtttcgtttatctagcgaggagacgagaactcataattaccaatatgattgacacttcaggctacactttccactggcatttcttggatgcccaaacgattagacatgtagtttaatttttttattatatgtagtgtttagtcttactcattctgacactaataattaccttttcattaatatataaaaccaaacatatatctcgattcattcaccatttcaagatttgataaaaagaggttcttccacactaataattactttgtttccaaagccccaagcggactgccactaatttgcctcaccgctaagttggtgcttttgagagtacaaaatcttgagaaatcatttacccctgaccgaaataaattaaattatctacaaaaactagacatttcaagctcaattttacatttatattacatccagcggtaatttacattaatattacacaaacattatacatttttcaagcagaattttacattaacactaaacttctactaggtacttcaagttacgtccttactaattagccaatttgaaacataattatacaataactgcaaaaagatacaataacttctaaaatatttcttcagaagttacccccattgtttttgtatctctacaggatttcacaaattcgaagtgctgcattgaagatgtaacacccttcacagtaatgttcgccttcatgccaataagcacagtctggtacatttatcctcttagagtaagcaaactcccagattggaccgaaggtatcttcattagctggttcatacgccaacagtgtgtcaatttaaccttcacattctgcttccaaatcttcagagtaaatattgaacaaaagcctatcacctaagctcttgaatatcatgtcgaatgtagcccctgctagatcaccccgtccagcacacatttggaacatggcataggccacggtcgccgattcatcatcaggaactatttcatttagcaaagcaagggaaccttgtatatccctttcacgggtcaccaaacccaaagcttcataataaagagcctgacgattctgaacagccaaacaacgcttaaagaagcttctagctacaccaccaggatatattttcggtggctcgagacatagagcagttagatttgctgactttacaatgtcccgcgagagtgcaatgtcccttcctcgtttgtttgtgagtattaccggagctaagtaatatgcgtcgtcatctcccagcttcttcacaataatatggaagatatcatctggtaaatctgataaagacattacttttgaggtttatgaagtttaaaaggagtaaggaaaatgaggtgtggatgagtagacgaaccactgaggacatatttataggaaacaaaaacaaaactgactttcattgtttaacctaaacctatctgggctatagtactaatgaaacatccgtacaccacaggcgctgtacagatacccgtccgtaaaacatgtatgctgtacagatactcgtccgtacactgtcttacggtacactacgatgttgttcctatagtacactacgtatgctgtacagaaaacaatccgcacaccttcatgtacactacgtttgctgtacagaaaacaaactatatatgttctcttccagcatgtcataataattagttctttaataatcaattcaaacaataatcagttttttcataattaaatcaaacaatatgttctttaataacccattcaaacaataattaggtctttaataattaattcaaacaacatgtatgctgtacagatatccgtccgtacactgtcttacaaaacactacgatgttgttcctatagtacactaagtgttctgtacagaaaacaattcgtacaacttcatgtacactacgtacgctgtacagaaaacaaactatatatgttctctatagtacactacgtatgttgtacagaaaacaatccgtacacctatagtacactacgtatgctgtacagaaaacaatctgtacaccttcatgtacactacgtttgctgtacagaaaacaaactatatatgttctcttccagcatgtcataataattagttctttaataatcaattcaaacaataatcagttctttcataattaaatcaaacaatatgttcttcaataacccattcaaacaataattaggtctttaataattaattcaaacaacatgtatgctgtacaaatgcccgtccatacattgtcttacagtacactacgatgttgttcctatagtacactacgtgttctgtacagaaaataatccgtacaactttatgtacactacgtacgctgtacagaaaacaaactatatatgttctcttccagcatgtcataataattagttctttaattataaattcaaacaataattagttctttcataattaaatcaaacaatatgttctttaataactcattcaaacaataattaggtctttaataattaattcaaacaacatgcatgttgtacagatacccattcaaacaatatgtttgctgtacaggaaacaatccgtacacctttatgtacactatgtatgttgtacagaaaacaatccgtatacctactgtacactaagtttgatgtacagaaaagaatccgtacaccttacacggtgtacagaagcaatctgtacaccgccgaggatatacaaaataataagttataagtcatattaattagttggcatcttgacaaaaaacattctttcggttttataagtcaaaaacataagttcaaatttaataattatacaaatgcatacttcgctcgcaagtcctaaatataagttttaagtcataagccttgtactagtttagaaacacacaaactataagtttaggaacaagtaactagtactcgtcctcacattcaacaaaagcagcatatgtatccatcgcataaaccttccgaatcctaatcaccacttcatccgttatagtcgccatgttagtgtaatccattccatgagcatgcatttcaaggaacttgcatgccacaggcccacaatctccatcgcctttgttgtcgtacagtcctgttacccgtgtacagctgaaaggctcagttgtcatatcagcggtgagagttgggcagcaatacttcttcaggagccaaggaatgctactgatgactggggtcatttggatttcgactgcttcttctggagttggggagatgaacgagtctagaacatctatgcttcgttgcttcaagtttatcaccaatccaacccagtgagaacaccccagttcattggaacgtagacaacatcaacatgtttcaggaattccgatttcatgtgtatcccagtcgacttccctgttacgtatcccttgattgtttttccccactcgtactttgccttgtcctcgcatttctggaaatcttcatagtgtgtggacagaagcgttgcaaaccatgtatcaatgattgccacccttctttgactgtatgctttaccctggcgtctcatcagcattcctgtaattagctgcatatgctgcagctcataatagagtaagtcatgtcaccaaacccattctagctatgaacgcttgaaatattattagttttgcctcataatacctcagtgtttacccatgtctccttcgttgcaatgtccaaaaagtggttgttagtcactgtgtgcccagtgcagatagtgtactcgctgtttagcttggatgttagatttaaaaaatatttgtgtctgtttctaataaaactgagaataacaaggatcaaacctttgtggatcatctgcaagcagccttttaaatgtctggaactctgcatcatccaactttgggagaggtgtgtatgcaggttccttggttctgcttttaaacagagcactgatcatgggatccacgctatacttagttgtgtcgaggaagcgagaccgtattggaacacgtttacccggcactggctggcgtatattggttctctccttcacaaaataagcaggtgaaacagcaacaatagaagtgtcgggtataacctgggatcaaaacatacaacctaggtaaaatatttgtatctcagatttgtgtatgtaatctactactcgcaatatagacctaagcaatcggtgttacttgtgaacaaggtgtttgccttggcgacccagatcgatcccccaaatccaatgcttcttccatagtttctattggattggtgtccataggcttgtcttgcgtggcggttggcattggcgaagtagggctccctctacccctttcctgtggcttacaaaaagaaaagaaaagttacgcaataacaataaaccaaaaggggtagctttatggttaacacacaagcagctacatttgctcgcgaaattaatacctctgcacatttttcattctgggctgtttctgattcctcctcatttatcccgtcttttggaaggggagatgtagggatctctgtacctatcttctataaagtcccaacataaaagtatcatcacagagaattgcataattaaataagcaaaaatctacataaaaccatcagttttgcttttgtatatgtaagcattacctctgaaatattttttgctgatccataaagttcccatggatcaacagagccttctagatttacagttcctccaccatccacacacatgtcagggtccacagctggtccatggttcagccccccgaggatgagcctccagaagataaagaagtaacctcctctcttttccttttccgtgtaacaggttgttttgtccctttcttcttcttgctttttgatttaggggtctcaggagcccctgcagcagtttcggtgatcttctccttgaaatttttcaaaatatccttacttatgttgtagcggaggtcttcaagttgttgagtaaaccattccttcattccagccaattcaccatgagtaacaaactgagaagaggagcttccttgaccagtctgcgttgcatcttgctttgctgtctttttatggacagtctttccaacgggtgtagcagctttatcctgagtaggcaggggttcaacattcaatccttctttcttacttgaacgcgtgaaaggcttgcgacggatggggtagtattctttcttcgcccgtttcacagctttacttggttcacatttgtcttctggcccaacagttcgtgtccctacaaactctacatcatcattagcaggcgctacgccaacatactcggcgtttgttgctggagcatctttggaagagcattgtatgttgtgtatgggccatgtttcagccttgaagcggtgcttctactttatcagagatattatcaactccaccccttcatcctcttcttcatccggccacgacagatccccctttacagtttctgactgatatagtgtatattccacagacagctacatgattaaaagaagagcacattagcttaatattgatgcatctttttggataaatatataagttcaaaacaaccgctataatgttagaaccaaagccaatagtcaacattacttacattagcactttgctcagcgtcatgaacatctgattaccgcagaagaattatgcgaccaaggtcaacagaaggcctctggataaaattcctgaagtcaacagggtcttttatccgactgcatagggcaggaacggagttgagtacctggagctggagtgcaagagggaactcgtaacagacactgctcttctgagacagccggtgtaatgcccctgaccttgactatgcggccggacgtgcagcctatcgagtaaaatgcgagatcaagccaagaaaaggcaagatcagtttggccatttgatgtggcaagtcatgggtaaggagcattgcaatggatcaagtctacgggtaaaggaatgactctccatcagacagactaagcttagctacgatgcgactatcggtaaacctcaaaaccattaggctagcccttagacctaggatagcttaggaaaccttagttttaggaaaccttagaagaagtaggaaaccttagaatgactaggagaccttaggggaatccatttgggcagtgggatatgagtatgggtcttgaatggtcgagggattaatcggagaatgctgataagtgacgataacgagcttacttggttaattctggcatggaacgagttatagacctaaggaagccttgatttatgtcatggaccctcatgagacattggagatggagtgagtcctatcaatgctcttgcggtccagtgacagatcgtgggtttcgccggaatgaagaaacggacggtcaggattgaactatggctcatgtttatctattaaggctcaagcttatccataattctggtcatccttatcctttagggtcgagcttattcattttggatgatgtttatccggaaaaaaatggaggaaaccaatcggagaccgattagtgtcccggagcgcccgtggagtgacacttatcgaactttgattggtccgggccacctcctgcttgttttggccgaccttatgaccgacttaagaccctataaatagtccacttcgtcccatttgttcctcagacccaaaatccactagaaaacgcctagttcgcgggagaagaccttagaagccaaaccgctcgaaaatccatgtgagtacttgagtcacgtgaagtagcacgtgaataggatagtttattattttatttccttattatagcttaggaggttaattaggattagttagcttaattattcgcttaatccctgattaggatagttaattaggtttagtaatagttaattaggattagtgatgcccaattaggattagtattctctaagcatgattaggactagttaaacctagattagggaaactaaccgcgattagtggtaattaagtatgattaattgtttgattagtatagttttgcatataggatagttgcatagtagtatatgagtctgttgtcatgttagtagtctttaattagatgactaacattagccgaaccatgaggatcccgtccgtatgctgtgcgtcgcgtgtaaccccgttccgttatggcatacgaaggctcggggctggatcgctaccgaccgggcactacatgacgatgtagtattagggaatgctatgtctcttgtagactttgtgtctaagagatggaggcatgtcctgggagatcatggattcgtagaaggccttacctaggttgttacaagcatacttgcattagttgtccattgcatattaggaaatcgagtctgcatgcatttttctttgtccattatgtcttgcttgcattgcttgttgcgtgttttctttgtctgtgtgttatttgcattattcgtatttattcttcttaggtcgtagtattagattctgtcgatgctgcttagggtagaggtattatggtagttctgtctagatccggggctcattaagtaatactagattacttatgatgctactttttgtggaggaaaccttagttaacccaccttgtagaggccgctcgtgacttaggacaaaccaatgtagattttacggctttttgtaagattttactaagtatattatgtatgttttcaaagaggatccgaaaactatatatgttttggtaaccatttttcgtatgatatatatatataagtataagattcggatttctaaagttatatggttatactcactgatattattagtcttgtccggactaacacaactcacgtctgcggtacgggttgaaaagccttaggccacgggcgggaggctagactcttgtggttggacgactcgggcatacgaatttgtttcggaaacctgggttggccgactgcgggcgtctaacgtaacgcttctatttcgtttatatttatatagcgggataggggtgttacagccgggccttcagctccccaattggatcttcttctccagcagaagggccaaaccgttccattgttgattcaaaagaaacgcgcccccatgggtaagacaagaagaattctatatcatgcagcatttctacaaagtctcgtgtaacccgatgttgtttcctattgctgcatacaacaaccccatcaatcagcaccaccaatgcaagactcagcttcttccatgttgagaatcgcttccgagtctccgctttagcatcctcccttagcatatctatcacatccattactgtgactatacttttcgcaccaaacagccggttccaaacagacaggtatgctgggtcgtggtgatcttccacctcagattcagatggaagcttatcacaaatcagccctgttgtcatttggaattctcgtagagagaaacggagtgggaaccctccatacactgtccacaattcatgtttgttcttcgtcagaagctgtcttgcaagcatcccatgaatgagttttgcagagtgatgacacctgctcatcccacgcctccgaaccctccagtaattccaccagaattcccaaatactccggctttgagtgtatgttaaggcgtcccccatccgagaactccgctggatgcagcaaacggcaagggaggctcgggtttgtaaattcactatctctggatctctcatctcctattgttcatatcagaaaaacccaaatcaaaaaaaatgttccttgacaagaaataaggttcatcaaattcaccggcaaagggacaacaaataagagtttgcttacctagtttagattcgtttcttaatcctccagatttcgccggagttttcgccggcgatggtgaaattggagactcgtctcttaaccctcgagcaatcgccggagattttgcaagcgtatctacaaataacccagaaacctaattatgaaccccttttaacccagaaattatcacgaaaattgattgaagaaccgtcatcagtcttacgacttacctcgccgtgcatctgctctggagtttcgccgcttcagttcttctttcattaccaccggagggcttattgtcttcgatttactcaactttttcttcgtcattgcagatattcttcgtactacagaaaccaacttccctcaacctccttaagaaaccagaaatatgaagagtcgagaagaaatttctttttttttttgtttcagtggcaactctgtaattacattgaaatcgtagtggcagaaccggggtcacaaaaaaaccaacagtaaccacctgtattacattacatattgtaaatagtaagtgtactagttttataattatgttctgtaaacgtactactttgcaaacaaactcatagaaatatctcaaaaatttcaaacttacaatttgttctcctcgcgtgtaatggctcgttccacccaagttgtgcgtagctattcctttcctgcctcgatcgcttttgcgatttttggagttagtcttggatattgcttgggtctccggtttcacccaatgtagttgcaacccttcaaaaactttatcattcacccctctaggttttttatctttgacccacctttgcttccactcattgattgtgccacgataacgagaagatatgtctttgtcaaacgctttacgaacctctagcgtcaaattccgatcccaattaaactcttgctacaaaataaaaaaagtacgttgagtaatacataattaaagaacaaaaatacaagcatcatcttcaaaaaaataactaaccgcgaattgtttcaaccacaaatcttgttctttcgccggcattgacgagtaagttggatatggatccttgagtagtccttgcatcatcttcaaaacagatttgcttatcccgtttcccgaactctcaaacctacaaaagtttgaattttataaatttatattaataattcaaaaagatagaaaatgtgaattaaaattccaacacttaccatgtttcatgatcgattctatcgggatggagctttgtgagtcgttctcttcctggttgagagatgaagtcctcaatgctcatcaccatgggagtctctgacgttggcgactccggactaagactaggggttcgtgaatttgaacgggacggttcttcacaatcttgagtagatcttgattggttatgacgacggtagttaccataattcctaaaacaaatgtaaaaagaacattggttatttatgaattaagtcatcaaatttatgaaaaagaaaagtagataaataaaactcctcacaataaaccaaaacaagaaataaaaataacgtttatacttaggaaaatatagctttcaacaattcaacaattgattcacaaaatcaatagattcacaaaaattggaaaactaattcaacaattccacatcactaacacatatatgactaaattcaacaaaatctaacacatatgtgtttaacccataactatccaccgaagcatataaaaatccaattgaaaaagctttaatctaaagaacaactgtatatagaaaaagataaactaattacacaaggtccatttgaacaagaagattacacgatgacatggtacccacggtattgacaattacaattcatgccaataattgaaacagctttgtacgcttggaattttattttattagttaaaaagtaattagagaaatcacttacatgttagatgtgacgaaggtgctgctctaagggaaataggaggagagaattggcggaaagaagaaggagggtttgagagagatgaagttaaaaaagaaaatggagaagagggattaaataaggaccactggttttcccattattatgatataaccgacagattttttgtcggtttacgagaaaactaaataaaatattaaagggcgcgctattcgatagttttgggaaaactttatttggcgggttcaattttgagatgcgttggtaatccatcggttaaaacaacggtttatcaattaatttcgaaatttttatgctcttcttataatgatcaattaaacgattacaattctgaatttattcttccgtcaggaaaccgtcggtttatattatgtattaaccggttccggttaggataagtttagggtcaagagttaaaatttcatataaacaaaatgaaatgatcaatacaattaatgataacattaaaataaaactatattaagtgtatatatgtctctattttactctcatttacaaaaaaaatgtataatgaaaaaataaaaatgtcatctacttaagacaattacataagttaccttagaagtttaagagtacttgtgttaaaacaatttcgaatctagaaaatcaacaaataggaatcaattgaaaatagtttctagactctaagttatttagaaatcatcaatgaacatttgcaagcatgttaggctaattaatttgtactttcgataccctaaaacaaaagtcgttgggtaaccgtcggtaatccgtcggctaaaactaacggttaaccgacggaatttttggataatctacttaacatttttgaagtacaacttaacccatcaatcttgggtcggtttttttttatgggtttaaccctcttttttttggattttcggccaaacacatgatttgagatgatatttggcccgtaaagaaatcttaccaaaatttacaaatcgctttaaatactaatcaattacaattaatgatttcccttattatcgaccaaattgaattcgtaatatatgagaatatttcaaaaatctcgctaaacaattccctaatatctcgctaatcaaatcatggatagagattgtgattattttgatttgttaccaaaaatctctcaaaacaattccataaaatctcgataatcattatatattatctatttaaagtaaagaatttgaattgaatttctatgctaaactatttgccatataaatctccacagaatattgaaactatattattgtattacaaacggatttggtgcatattccttaaaaatttgattacaaatatttgattctcatttagttaagactggaataaattttattggccaccaacctaatcggaactcgcctatatatactttctacctctcatcacaatatcaaacacacaaacaaatttcatcacatatctttggattcgagacaaaaaatgaaagaaatgattcatgttaagagattagctgaattcatcatatggcggtgttattttataggacgtgctttaagtgtaacatggagtccagatgcaaaaaaggatattttcgactagcagtgatcggtgagttttttagattttatgaaagattcatatttatttggataggtgttaattagtttttcttcataactgttttttctgttgcaacaatcatttgtaggctgataagatgttgggacgctagcttgtgtcatgaggtttatccaaagctaaagattgttgggagaagaatgcttgtgctgttacattcatcggagatggtggcacaagcgaggtttataatctttattaattctcatttctttccataagaatcaacatttcaagaattgaaatttacgtagtttttggggtttggttgtttgggagtagggagatttccacgccggattgaattttgcggcggtaatggaagctccggttgtgtttatatgtcggaacaacggttgggcgattagtactcatatctcagaacagtttagaagtatgaaactaacttaacttcctctgtttttttcattacaaaagagaccaaaataaatccactgttttaatgtgagcttatttggtttgactacaggtgatggaattgttgtgaaaggtcaagcttacggaatccgaagcattcgtgtggacggtaatgatgcactcgcggtttatagtgcggtatgttcagctcgagaaatggctgtaacagaacaaagacctgttctcattgaggtaaaaaactatactaaagatttgtctcaaagtttacaacgtttgactttggtgaaataagattgttgttgctttatttttgtgtggcagatgatgatatatagagtaggacatcattctacatcagatgattcaactaagtacagggcggcggatgaaattcagtactggaaaatgtcgagaaactctgtgaatagattcaggaaatcggtggaagataacggatggtggagtgaggaagatgaatcaaagctaagatcaaacgcgagaaaacaggtaatgattcggaaaaccgctacattcttgatgttaagtttgatgttattttaaccgttttagttggttgtgtgtgtgtttgtagcttctgcaagcgattcaggctgcggagaagtgggagaaacaaccattgacagagttgtttaacgatgtatatgatgttaaaccgaagaatctagaagaggaagaacttggtttaaaggaattaatagagaaacaacctcaagattatatgatgttaaaggaactcataccaaattggatattgggaattgggacgctagctttaaggtatgactttcaggaaactctattcaatgggtggcatgcgatagcagaactacaacagttaaagctaaagatcaaacttaactcactattaaacgatcaggtatgctgtgtctctgttgtatactgtctttgtattcattagactatgctatgcttatggataaatatgtgcacagatggtgagactatgttagttctttagttggagccatatccgatttagaagtaaacactcccaaccttctagccactgaagtaacaaaggtatatacactattgcttttacgactattcatggaaattaaattggattggttcaagaatgtagtcatcatttagaacttctcttttataggcggacactgaatctttaaaagcagctaggaattcagccctcaatgtaatacaggctatgatcatccatttggtccttactctcaaaggtgagactttttaaataaatttgttttccaaatttatcctcttgacagaattctaaatgcgggtgcactgctctttatggtattgtatatttgcaggtggaggagatgaacaaaaatggtagcaaaattctatgcaaggaagatgcgaagattttctggctgcaattgcgatcatgcaagtagcaaaaaataactaataatttaataaaaatgaatctttttaaatgtgcaggattgtgtttttctcgctgtagcttttcatgcattctatgcaaagggaagattctctcttcctacttccacgtaactgtcatgatgttttttttatttgtttagtgtcgtgttgcaagaggaagattctctcttcctttgactgaggagacagttcgattcaacgagccgattcaactaaaccagaatatggttaaggatggtggttacacggcggagctgtttccgattaggaaggaagagcaaggggaagttagaagatgaaaaagcgaatgtgatatttggtgtattcggtgggagttcatgacagaggtgccggagatgattaggacggaggtgaggagttacatggcggatttactactaaactttacatgaaggacaaaactacttgactttgcttttgtttttcgctacaaatattttttttattttattttgttctgtttacttttttcaaataattttaagggattgttaaaactcaaaccagttcatgtaaccatatactaaaggtcaattatagtaaaatattatttttttgctttctaatatacacaatgtaatttttaaaatcctttacattacaaatacaattttttggacaaacaattgatcactgttattaaaataattcatcaagactaaagatacatatattataatctatactataacaaattgatttcttttttaactaaaacaaactaacaatacacatacaatatactcaaattctacaataaaatcattatttcaatacactcgaatgatatgtttttaaataaaaatgtttggtgaaatatggacaaaaaaatcaataatcaaagattattaagttttaacacaatatttactaattaaagattattacctcaaatatttttaataaaactttacaaattatcttaggattccccaatattttcaaggtggaatcttagaattaacaatcagagtacaaatatataatctttaacactaaacaaaacaaataatagtaacataacaaatataattttaattttaaatttttagttagaaaaatatactttttgttggttttttaaaaatcaacattattgtatattaaaataagagtgaatcttctttgatacctctaatgttaatcttttttaacacatctaaatatctaattgtaatgcaaagttactaattgtaatacaaagttaaaaacactgaaagtttaaattatataatttagatacaaaactttatgaataaaacatattatattattttatagtgtatcacgggtcaagtcttagaagataaaataatattagacttattaatatcataaacttacgacttaataaaaactatatataaccttaccgaaaggtgtattaaacaacaaaaacaacaatacatattatacacaacaacttcttcatttataaaacaaaaaataattaacccgtggtgtaccacgggtcacattctagttgttaataaatttttataagacagtagtcgacgatattcttatgtatcgtcggtaatccgtcggttatgtttcaagaaccaacggattactgacagaacgaaaatttttaatccgtttttttgttttattcaatttttacatagagttgaatctatttatttttaaatatataaaaaataaatacataaaaacataaataaatttttcattaaatttttgtaatttattagtaagtataaattaattatagtaaaacatatttatagtaaattacaacatagtaactaactactctgaatccgatgaataatccgaagatatagaatctgaatcatcatcaatttccccaatagaatcctctgactccgaatgaatcgtggcgtccccgaacatggtaaaatcaacaacaaggtcaacgccaagggaatgttcgaccgggggaatgttacaactttcgcttgactgtaaaggatcattagtaccaactccataaacttttcctcttgggtttataggcgtcactgttatccaaaggtcatccctatacgtaattcgaggatatcgaatgtaacacacctaaaaaaaattacaattattagtgtatatatatatatatatattgaaattatttgttataaaaatagagaatgatgagcatacttggtcagcttgtgatgcaaggatgaatgaatcgtatttgagtaatctctgtctcggatttaccgatataacaccaaatttgtcaacttttacacctcggttaatataaggatcgtaccaatcacagagaaatactatgcacctcaagttcatcatacccggataccgaacttccaaaatttccgaaaggacaccgtagtaaccatcatcaccggaacgagtagatataccgtaatccgccatcgtcctcgtatttccatcctcgcgaattctaaaagcaaaacccctagtgcaatactgtgggtacgatgtcgtaatgtatattgggccgttgacaaactctagtaaccatgttggaaatgtatgacctttttcaacttcgtcggatacctataatagaatacaaaccatacttgttaacaattaataaatttattaattattttgaattaacaaaacgaaatatgtgacactaacgtaatatttcagccaagatggaaaatctctttgtttaaggagattaagttgatcttctgtgtagtctggatagtaaaaacgtattacacccatgtaaatcctatcataaaaaaaaaaaatcattaatttggtagaaaatagaaattattatgaacacatatataatattatgtactatatacctttcatattctcgaatatcatcgcaattggtgagaatgtacatgagcaagtgagcatgccttgctctaatagcttccgttttttaccttttccactcactcgtccgatttctgtaaacaagtttgggacatataccggatacgttgatctctcaccgccatcatcatgccgagaaggacgtcttcttcgtacgaacttcagacggaagtaatattcggcaaaatttgaggcttcttcattgatgctttgtgccacaatagaaccttcgactttgctcaaatttttcacctttttctttaaatggaacatgtaacgctcaaaaggatacatccaccgatattgaacagggccacctagtgctgcttctcgtgggaggtggactgatagatgttccataacatcaaagaaagacggtggaaatatcttctcaaaattgtagagaataatcggtatattgttttccaaattacgaataccatccactgtaagtgacctcgtgcatagatcacggaagaatgcgccaacacctgcattttaatatataaaattaattttttaaaaattaatatattactttataatattatttataaaatgtaacacataaataaatcaaaagtatgagtaattaattattaaattaaaatatttaaatgtacttgcaattgctttgtggacgctttccggtaaaagatgtgcaaaggcaaatgggagaaggtgctgcatcacaacatgacaatcatgactcttcattccaataaacttcccttctctagtatcaacacaattacgcaaattagatgcatatccgtctgggaatttaacatcatggataatccactcgaagaaccgttgctttgaagttgcatgtaaccagtttggacattttccattcgccattacgtgtcgctcatgacgacagcaaatctctggcaaatctagtctagactttaaattgtcttttgtctttcctaggacgtttaggatggtgttcatcatgttgtcaaagaagttcttctcaatttgcatgacatcaagattatgccttaacaaaagatctttccaatatggcaactcccaaaaaatactcttcttatgccaattgtgatgctcaccaacaccatcaaaaggagcatgtccgttacctccacaatcgggagttctctcagcaccaaagtcttgtaactgagtcaaacaataatcaccgtctaactcaggaggagagtcatcaaagactttcttgttcttcttaaataacgagttggccctacgatatggatgatctttcgggagaaatcttcgatgacaatcaaaccaacacgtcgttcgtccgtgcttaagttggaatgcatcagtgttatcttgacaataataacacgataaccttccatgagttgaccatccagataacattccatatgctggaaaatcgctaatggtccacaaaaggacagcgcgcatctgaaagttctgctgcaatgaaacatcatacgctttaactccttggttccataacatttgcaactcataaattaatggataaagaaacacatcaagcgatctcttaggatgttcgggaccgggaacaagaatagagaggaatagaaactctcgacgcatacacaaagttggcggtaagttgtaaggttttacaattactggccataatgaatattgtcttccatgcttcccaaatgggttgaaaccatctgtagataatccgaggtagacgttgcgtggctcaaacgcaaaatccggataaacagattgaaaatgtctccatgcttctgcctctgaaggatgagtaatttcttctcctctactatgctctacatgccatctcattggcccggccgttcgatcggattgatataacctcttcaacctatcccctaacggtaaataccacatccgcttatatggaacaggaactctaccactcgtttcttgatatcgcggtttgcgacataatcgacatcttttgcggttttcatcttgtctccaatagatcatctcattggcccggcaatccgattccagtaatccatcgctattccgtcggtagttttgaataactcccgacaaactcacatatgaaactaatttcgtcgttattccgtctgttttatgtcagtaaaaaccgacggatatgagttcgttactaaatctgttggttttgccagtgttttcttgtagtgtaatagaatggtaaaagggggcgtagagtcatttacctcgggatgatctgccccatttcttctggaagagttactcaagcatttcattgctctgtccacttcgagaagaggatcgacgagagtcacgccgaggtgaccagtgtctttgtggagagtggcctccatggtgctcacgacggggcatcggcttgtaagcgtctccggatttggcaccctcagtgctgccatcgtcgactaaaagggtctggctgtagtctttcttgtcaacagcatttgcaagaaactctttattttcttcacatgcctcaaccattggcttggacaggatcctacgcttggcgataatggcccgggctgacatgcctatggttgagggaggcagggtggagatgatggaattgttcggggggactcatcataagcttgtgattggcttcgatgaatcgatcaagggtgaaggagttccagagggtctccctttcgattactatcttgaagaattcaacaaattcttcggtcgggaaagtttaagccggaggagttgcgaaatgaaataacatctggagttagtacaaaaaagtggttagctaaaaacgaaacatatatgcactaatatctactaggcttagatgaccactttgatgagagcaattcggaaaggtttccgatcgaagcaagcgttttcttaatcaagaactttgatgccagttctcatctttgttggggaggtgcgaaatgagattcttgttggcgtttgggtacgccgagaagtagcccgtcttcttcgacgaacttcttacactgaggaactcatttaattcgggaaccccaatgatgtatccttcctgcgccgcgacggttattattcccagaatggttctgagaaggttgggggttaactaaggtagggcgattccgagggcctcaagataacgaattagggcttcgggaagaggaaaggtgataagaagattttagtcaattaacttctaaaacactaatcatgacgttgtagtattttaggttgttaatctaatccggtgttatgcaaacatatgagatatgatttgaatgtactaagttaagccaagcagagatttggttgtttgtaacagtcctaaagtctaataacagaaatgaaatgaaactaaaatatgaaattgcaatgacatgcaaatgaatagcaaagcaaataagataataggcaatcaaatggataaacgattcctaaggatggggtaatcgaatagcgtggtgtccttaacttattcaggcggttgacaaaacttcacagaagctatcgctagacaacaggttcaacaacagattaattcactctcgtgatagaaatcctcatgtagagctagacacagacctaattccaattagcgatctctaactaagcaggcaataagaatcgactgttaaagccaataactgctctaaacggccaatcccttgggatatagacgattatcactggaattagtagatccaacgttccattaaacgccttgtgagcgttggaacgtctaggatcggattctagttgatcagaaaggttataagcagtaaatacaactaatccagaagggactctaatattctaaactcaaccctcaaagcgaccaagaaaaccacaactactctatccaatccttagaaatacagttcactactcatacataatcaaagacaatagcaaagcagtgattgaaaacatgataacagaaatgataaaggatgaaacgaaaactgaaatattaaatacttgaaagtgaatacaaagacacatgaaaaacactatggctacgagaattacgaaattgatatataatggatgccctaggaaaaacccttagaggctgtttatataagcaaaaacctgtaacaattaaggaaactagatagataacaaatcttcacgtggggaccatgcgatcgagtatgtcgttagcatctgatgggctgaaatgggccttcctggtatgtcattgatcaaactgggcttcagagactctgccttgcgatcgagtggttttagtgaagacgagatggagttgtccagcgaccatgtgatcgattggtgcgatcgagtggatgtcatgaggtggtgatcgagtgattttttcagtattcatggtggtcgagtggtgatcgagtggtataggatgggtgattcctccggcttagtaaaactgagccgttgccttctccggggttgcgattaagtgatttgccctagcagggctctaaggttgcgatcgagtactttggttgaaggcgtcattgaccattctgacttttggttctgtttctcctatgtttaaactccaaaagcatccaaagtacatgaaaacaaccaaacctacaatgcacatgcaatcctaatacaaaaccgtcctaaatatgcaaaacacgctaaaacgactactaatgagatgaaatgtggatgaaacaatgacaaagtggtgaagaatgaatgcctaagtcatacatattatagacatatcaaatcccccaaacttagtctttgcttgccctcaagcaaacaagaagacataagcggaaagagaggtttgaaattggggactcagcaccaaagcatgagatatggcaattaagatcaatatacaagctaatagttataagatgcgaggtcgacttctacttataaaatttagtcctgccctgttatgatccaaacctacactcaattgcacaaagcgtcaagatcaaccaattcctttaacatttgtcccctattaggatgtactattaaaccaaaattggggttatccgcgaaattcgattcggagtcagtacacaaagatttaaggtcatttcttcaattgcggtcagtctttccatatcttcttctttagctcattcgcaatagtttcctccattctgcaatcttttggtttcccaaggatagcggtggctagggcaaagcatgaaagccagcccgacgaaggcctatgatagagtaagaaaaaaagtacgttaaagtgacgaagtaacttaagtaagtcggctccgttgtgtgaaaatggtaccagtggttgcttcctcctttatttgagtccctcgtggaagaagaattagctgatgtagaaggtttctttcttatcctatccaccacatcttttacatactcagacagactccagcgcctatttcaagctaaagagatcacaatagtcaattcattatattcaaaaacatgaatcaagatatgcatcgctagtgaactcatttggctaaggacaggtaattagataagatggtccttttaaggtgtttcagatttttaataccaagtgactctcaatgaaaaaggattgagctttagaagaatgctaaaggtaagtgccaacctatgcattcaagatcagcaccccatctacccaatgacataaaccgtgaataacaagtagatggtcctatctctaaactcaatgatgatcctaagtctacccttttgcactaaaggcatatttcgatttttttcctttgatcaatgtatcctttcttttctttggctcttgttcttaaggagaagcttttcttatattctatgagtctcgtctagtgaattgggtttttcttaaactcttatggctcttataattttttttcttttttgtttttattgtcatcttcttttttttagagcatatcttatcgattatatgctttccaaacattcattagacttcgatatgattttcaacttccttctcctatagactctaacccatattttttattttgcttttcacactcaatctctttccctgaataagttcccacctagtcctaccaagtccgaaaacgcggataggaacaacatgagatattactcttgtcggctcaaacctaacacgttctaccaagatcaatcttgaaaataggcctcaaatgctctcacaaaataacatggcttgaaagaagggttgtttaagggtgggggaactactccaataacaaaagcagctacacttggattaacaagagtggtgaataagtgaaagaaaatccaagtatgtattctatccatgagttaaaaaacgatgcaaacatgataattacaggtcagattcaagttcaaattgacaggaaaaggtgtcatgacatgcatcaagtggtttctatagaacatggttcggttttacttcaaagtctatcaaatgcatcaaacaactaataactcatttagtgaatcatcatgcttacatgattatctccttattatcccctatgcatatgcaacaatcctatatggaacactctagactcgatcctaaatgtaatgcaactgtatgatcactctctttttgtagaattcattttcagaaaaattttaattttttttctatgacttagatgatatgcagactcaaatgatattcacaaaaaaaataagtcaaataggtcttgaaccctcccccaaacttaaattacacagtcccttgtgtaatcaaaatttgtgaaagaattgaaaataaacacaaaaacaaaaacaaaagcggtatttacaaagggttttcgtgtgttacctcagtagaatgtcctcgagatgtagtcatccatatctgcttgagtgtactccgcatgcatgaccgattcttgatgcggctccaccatctcctcgtcattgtgctcgatcgcaatcccagcaggttgtggagcacgacgttcgtgtgttctccggcccgacattatctggtctttgcttgatgagcggaccatccgagcgttgttccttcttttcttctcccttacgtcttgagacgagtgtcatgcggtttcttgcgtggcaactcgttctctctgttgataagcagattgccttggcggggcagtgtcatgacgcatggatggcaggtcttctcgcagattgtctctagtgattacactagtggatgttgtgcagctgagtgccttctacatgttctcaatggctttgaaacacccatggatgaccttatcttgaaacttgcaccacctttggactagacttagcttccagtgtgtttcagcgagactctagctttctcgtgaagggggcttgtattcttcgaagtggaaccggctaatgttattgttttcccagttgatctcctcattgtcagtctgaccttttacttcttcaacgtgttgagatgaagatcctccaatcatagcatggaggatttcttgttgtggcgagaagtcgatgttgcctctcaccgtgatggttgtcatttcactgaaggggagaagaatagtcgcttctccgttgacgggtgatcgtacttgaaggcgtatctctcgtcatagacttaatgctcaatcacatgggtaagctttagatgggcgatatgcatccatcttggttcagttaggcgtgatcgtatgcggacttcacacgatatgaagattggtgtaaccactcctccaatgcaaagggctccttttgctctcttcttgtcattggcatgcgcccaccctctgtagctgcataggtgattaaggagatacattgacgggggtgtgtcattgacatctcctttcattgttttctcgtccttggtgtagcggaggaaactcatcagtgccaggtccaacgtctccaatgtcttggttcgtcacactggcggatatctccctagcgtaagggacattggcttaggctctctggaagtagcgaatggcgggattgtagatggatttgctcttggacctagcatagttgaagttggtggtgtctccgatcgtgttccacaaagctttgaattcatctcgtacgaacctcggttttgttcccgtgtcactgggaagcccaaacatgttttccagcgtcttgattgtcatgacatagtcgcggtcgtcgattgtgaagcttaagtactgtgggttctgaaatccacacaagagattagttacgaagtttatgagaaaggagggctagatcttcagaagaactttgagatttatattgctaagaatgagtggacttttgtattgataatagtagagcttttataatgtagaatgagactacaagtgtccagtaataaaatgtgaatatctagctgaatgaatgtgtcctttccaagtcgtccttgcttccttatatcgacttgcgaacgtgggcagctccatccgagatccgcggggattctcctggatattcggaagattagctccgagatatcagggctgctctgcgaatatctctttgtcagttccaaagctgttatccgcatatctctcttcgtcagatgatcgagctcataaggcccaaatacttaattcgtacataggctctggagttgtgcaggttctctacttgaaggtcttgctgggcttgtgggctagcctagtatttttgcaggtggatccttggagggaaatccagctccaacatttgccccccagcccattgagtgagtaggtgaactcattgagaggagataatgttgataaggtgataaacaccataagattagtcgggtttgaggaaaagctcaataaaacggttaagattcagatttcctaaaccaaaagatatcgagtagatacgcaaggtggatcgctgctgacatggacgatcgagatgacacgtcctttcattgcacctcatctaacggctcagattcggcacgggaaagagatctctacaatttcaaaaatcgtggtgatgatggctctttaaataacttcccacgtctcaacttagtttcacatcaactcacacaactcccaaggtaacttctctcttccccattatttactgcgtttaatttttggttttagagataggaatttttatctttcttccgccatctccttcacgtttctctcctgtttctctcttcgatctgcttttctattccttttttcacctccatcgtttttcttattcgaaatcaagagatgagtgaactcgaagattcccagaacaagagcaaccacagctacggtgataatgaaagctcattagaatcgaagtaggcggcattttcacgactggaactagacgatgttggaaccctaggcggagcgggccaaatccggaggccatcgtctaaggccaatcgacctaagaagaagagcgctcctaagaagaagaagggaagctcaccgatgacgcctaataccctaatccacctgcggaggagatgccaagtccgacataggtaaatatgatcctcccaaggtcgccgctctcacttgagaatgtctcaaagggatggtgttgcgcctatgccaacttctttgagaaatataggttattctttctgattccagcgtgtatcctcgagatgttttactgcctcggactcgcttttcctcggatgtgctcaaattttgtacgccacgtattagcgttgttcacccgacctggggaaatgaacagagagtttggttgtcacgaattgctgcaatattgtcagatgaaaaaccaacgctcggagtgaccttggaacctactatatcagcgctcatcccggatctctaatcttaggtggcctgaaggtctgtcgggatttgaattggcgagccaagtacttcttctttttggtggaccatcactctgttggtgacttcgaccagacgaggatgataaggacttggtccactaacctgggtcagatggagatccgctgccttaatttccctgtctagtaagcatagattgctagtttttgaagcgcttgtactgttaataacgtcgttccctcttggttgattgtagtaaaaaccaaggaagtcattctcttggaaacagagggcgggcagatggtaatcaaagggtcgctcaggtctctggaccatctgaggttgccatagctgatgatgcaccgtcctctccaaagagagctcgaatcttgctggaggtgcgccctgcggctgacctggtcataattgactaggaggtcgctcctccaggagaagcgagggtggaactcatggcttctagcccggaagtttctgtgtctgtgcacaggtgatcctcgggacaatcccaaggcggaggtcgaggatcaagaggtgggggtagatctgcttctcaagtcctgactcgctctcaagaggtgaggccgacttccaactcgggtggagggtccgcgggcagcgaacctttccactggtctgacactcatgatcgtgttcatccgatcattgaggatgaagctgggctggcgaatctgctctgccatatcaaagggctgaactaccaggtccctagtgtgaagaacatggcaaaggcggcctatgctgatatgatggtgaaggaggcccatgtaacaatcgattaccgtttcttgccaattccactttttgtgctagttataatatccgtttcgttttcaacaggcgattgttgcaacgaacaagctggttgctttttacgagcaacgtcttagcaaggtttctccggcgagtgagctcgaagaagggaagaccctcatccaggaactgaaggcgactgggaagtcaggtaaggagcgtgaggcttcgttccaggtatacttctgttgtttttttttttttaatggtggaatgattttaaccaagctacaatttcaagtggagatcgacaggttgaagatggagctgtctacctcgaagggtctcgagaaacgcttgttgatgtggaaattcaaccataggtatccagcgtccaaaagacgttcaaatggatgtctgatctacgaatcccagagatttgtagattcgagcctaaaagattggatgtttagactgcttattgattttggcagattgttgcttaaagcctgctctgctatgtttcatcaacgagagttgagattaggaagtggtagagttatgagggtctctgtcacgagagtggattgaccttgttttgaatctatcgtctagggtatctgcctttcgcctgttagccacctgataaaccctagagttgcccttatcaatgaatccatccttaggatttctatttttcttagatttatttgtattcacccccttattgcacttttattcacttgttatctgtgcaacctgttgattgcattttagttcttaaatttgtcacttgttggttctactcgatccaatgatcgagtagggttcttaaagttctgatttttgttgtttgaatcctgatttaggattgttactagaaatccaccatcactataacctgacttgacttagttgcttctgtatacatcttgattgctagcaataacagtggagtagattgacaccccctatagctgcatcgacatgttagtgtttaaggggaattcaactgaacctcacttcagtacataagtaggcgtaataatctacttattaatttagcgccgttgccaattcattgttgcattgttacattcaagatatcacaaaaacttaagatcaagttcttttacatttatcaagttactacctcatattttcgtctacttgtttttgtggtataggtactaatctttgtgcatgcaaactcggtccaaaggttctgcacacctaataccttcaaagacagaattgacaaaatagctcgtgagttacaagaaagcaaagcaaaggcagcatgtgattagaaaaagaccagctgctatggatcaacagaacagaccagctgatattcaagacccgcctaatgttgaacaaccaaaaaacactggtgctggtgatgctccaagaaatcatcaccaaagacaagggatagtgccaccaccagttcagaaaaacaactttgaaatcaagagtggtctcatctccatgattcaaggaaacaaatttcatggtttgcccatggaaaatcccctggaccatcttgatagctttgataggctatgtggccttaccaagatcaatggtgtcactaaagatatgtttaagctcagactatttcccttctctttgggagacaaggcacaccattgggagaagactctgtccccagactccatcaactcatgggatgattgtaagaaagcttttcttgccaagttcttttctaatgctcgcacagctaaattaaggaacgagatctcaggcttcacacaggaaaataatgaaactttctatgaagcttgggagaggtttaaaagctacaccacgcagtgcccccatcacggtttcaagaaatcttcatttttgagaacactctacagaggagctttaccaaagatcagaatgctactcgacactgcctcaaatggatacttcttgaacaaggatgtagcaaaaggatgggagttagtcaaaaatctagcacaatctgatgggtgctacaatgaagactatgatcgctcagtgagaggaactggaggcagtgaggataaacaaagcaaagatataaaggctctgaatgaaatatagacaagctgttgctggctcagtagaagcagatatactacatcacttatgaagaacacttccaaatgcaagaagggggaaatgatcaaactgaagagctctgctatattcaaaaccaagagggttcaacaagggttacaacaactacaagatcaagtgtatccaccacaacagaatcagtctaagccatttgttcagtataaccaaggttatgtcccaaaacaacagttcaatgggggataccaacagcagaatccaccaccagggttcactcaacaaccacaacaagccccagcaccacatgatcctgaaattaagcaacttattcaacaaatcattcaaggacaagctaccagcggtatgacttttgacaagaagatagctggactaaacaacaagatagattgttcttacaacgatctaaatgtcaagtttgaagctctgaattccaaagtcaagtatgtggagagtcagttcgtatcgacctctgctccgaagcatcctcaacaacttctaggaaaagcagttcaaaatcttaaggactatactactgctaatgctattgatacggttcaaattaccctaagaactactcactcaaataagagatcaattgcagtatttaaggatcgatttccccaaaattcttttattcaaacaatgagttcaatgtcaagattaagctagcagggtatgaatgaaataaaatgagaacaaagtaagaaaatagaagatagattgtgtgtaaacgattaaataaaaggctaggaacagggtattctcaggaaactattggttagtaaatctaatgaaagctaggttgttatcaaaccattcttaaactcaaactctaattatggaataaccagtggtgttccgcgaaattccctatttctatagctaagaataaccagagaagccaagagattattaacctaagtagatagaccgattcttactacatacttataaaccaagctcatcaaataatagatccaactacagatacctatggtgggcatatctattgtctggattcaagacctagttaattactctagatctagcattaaacataataaagatgaagaattctagagataacctagcagagggggcgactactaaccatatggatccctaatgagaaaccctattcctaacgagcagtttactcagacatattgattgtaacaaacaacatgattgaataagaaagcataaacacagcaaataagataagggaaagaagggatctcttcgctgtattaagaactgaatgaatctctaaaaacgctcgatgaatagcttctgtctctcagtaacatggttttgcaaaaagcttgataatatgaaacttaggtctaaaaataaaataaagaccctataaaacgtcgagggactaataatgcaaagagggaagttttctggggtaaatttccttttctgtaaacttgaaagcgtcatggactttgatggaccaaaactggtgtcgatcgacactctctctgattttttaatccaaaatcgtccttagcttccatttccttagtttgtgctccaaaatttctccttatctccattgttgtatcattgcatagaatacctaaaaagacactaaaaagattcgagaaataacataaaacatagataaaatcagtaaaaatagggatatatcaactcccctaaacttagcttatgcttgccctcaagcaaaacataaaagccgaacccgtggaagaggttttgaaaataaaggaactcccaacattctctagcctgttgccatgatcacccaaactaagtccatatgcctaacaagtctaatcaaatcctaaccaacatgtacttctctgcaagcttacacaacattctagatttcatacctaagttccacaactatatccaccaggctttcatcgttgggtctcatcaaacaagctaacattcaagatccttctagactcattcctgtaccataccatgataaatcgaccatttttcaagatccttctagactcattcccaactcgtcaccagccagttccacagggaatatgaagctaaagacaagcgcatggaagcgtacctcgaactagtcaaaaccttgacccaacagttcgaatcgtttgaactgaccaggatccccagaggagaaaacacctttgcagacgccttggcagctctcgcctccacgtcagatcttttcgtcaaaagaattatcccaattgaaggaatagaacacccgagcatcgacctaacgatcaaacacgctgggacggaaacctagacaacttgcaactttacgcgagtaacccgaagcaccaccgccgcggctagagcccttgcagcagccgcggaggcagatgcagcggaggaagaaccagagcacggaactcccgaacaacctgcctcgtacgaacctgaaccgtacaacgactggagaatcccaatcatcgattacatcgaacgagggatcacacctcccgacaagtgggagaccagaaaactcaaagcccagagcgcaaggtactgcatcatggaagggagactgatgaaacgcagcgtcgcaggtccgtacatggtgtgtacctacgggcaacaaacgaaagatctcatgaaaagcatgcacgaggggcaatgtggtagccactgtagtgaacgtaccctcgccctcagaattaaaaagcaaggttacttctggccaacaatgctagccgattgcgtagctcattcactcaggtgcgataaatgccaacgacacgcacctactcttcatcaacctcccgaggaaatgtcctcgatatcttccccttacccatttacgaagtggtccatggacgtcgtacgtcccatggaagcctccggtgggaagaagagactaaaaaacctgctggtcctcaccgactattctaccaaatggattgaggctaaagccttccaacaggtaatcgagaaacaagtcgaggacttcctatgggaaaacatcgtatgccgacacggcataccttatgagattgtcactgataacgggactaaccttaactcgggaaaaatcaaagcattttgcgacaagtggaagatccgtcttaccacatccaccccccgttacccacaaggtaacggacaggcagaagccgcgaacaaagctatacttagcaacatcaagaaaaaacttgattcaaaaaaatcaatgtggtctgacgtgctccacggagttctctgagcctaccgaactacacctcgcaaatcaacgcaagaaacactgttctccctcgcttatggtttagaagcagtattccctgtcgaaaccatagtaccgagcgtgagaaggaccgccagtcttgctaacccggacctgaacacgcaaatgttataggacaacatggacttcatcgatgaacgcagagatcagggaatgatccgagttcaaaactatcaacaaactgccgcccgctactataactctcatatcaaaattcggagattcgaagtgggagagctcgttttacgaaaagtgttcagcaacacgagagagctaaacgctggaaaactgggaactaattgggaaggtccctatcgaatcacagaggtggtacgtgacgacgtctataagctcgtaaaaattattaacggagtacctgagttacggtcttggaatgccatgcatctcaagaaataccacgaataggtactcaaatacaatcgaactacgataaggcttgatcccttggcagggtacgtaggcagctcctcccaagagcgcagccaccaattcaatcaaatcaaaagggcttaatcccctaaccaggtattcaggcagtcacctccgcaaacgcaattaccatctcaacccttctatttgtaagacgaaacttcaacaagggaaacagacatcgcatctcccatcaacgaagatcagctgctcacctgatagttcaatctcccttcggtatcgagcaggtccctgctcgatgaccaaacgaaaaggaggtaaagcaagtgacgatctggcgtaatcttacgatacctaaagcccaacacccgcacgttggcggatccattttgtgatctcgcttccaaaaagtcaacagtggactaaaacttataagaacacatcacttcggcttcatcggagctcacctactacaaccaaatctaactctttcgctatcaacgcataacatagtaaacaaggaagaaacgaaggtttcattcgcgacctggcgataccacaagcccagctcccaaaatctggcaggtcccttgtgtgacctcacttcaacactttcccaagacaaaacaactcaaactcgttcaaagttttaaccttcgaagaacataccatatcacatccgaaataatttggacgcgaaacaagtccaattattatccgggacatggacaaagcgaggtggtctcacaccaaaatcaacaaagtgtcaacactcgaacgaaagacaaaaaatacttgctaaaaaggataaaagccttcccaggcattcgagtacttaaacgaacaaaggtgaaaagccttcccaggcaccaagttcaaaaggcaataaacaaaaggataaaagccttcccaggcattaagtctgaaacaaaacacgaaatcctaaaacaaacaaggagcgaaagtgatcactccctcgattctccggctggcgtaacgaagacaataccagaaccctctgtgagacctcccgaaaatgcgtctttgttgctcctaaactcatccaggccaattggcgtcccttgctcgtcgacgtccatcggacgtaccaccaaaatctctgaaacctgggggagatccaacttgcttagagtaaagtctgatacctccttcgacttgcaccgcgcctctacgtcatccagctctgctcgcagccgaggtttctccacggtcagatcaatagtagccttggtgatctggtcgatctaagccatgttcgattccacctcagccgcttgcctctccagtaccgtgtactcctttttggcgacccacttctccttgatcccagccagcagcttcgaatacgcagcagccagctcaaccttagcattgtgaaccgccttcttcgccccttttgcaatcgaagtccggtccaccaccttttgggagagctctttcctcttctgctccaagcgatgtatctagctcctcgccgtctgcttgtcggcttgcaacccctcgatctccatctccatgaacccgatcttctcagcaaaacctttctcgaggtcttttgaaatagacagctccattttcagcctctcgatctccgcctgaaataacaatcaggtcagaatcatcaaatcatcgacgaattatttataaacaagtcaaaaccgaggtgtaactggaacgagacttcgcgatcctgaccagccttcacactcgacgtcagctcccggatgagggcctttccttcttctagctcgttcgccgaggggacctggctcagacgctgctcatagagagcaaccagcttgtttgtggcagctatcgccttccgaaagcaaaacagaaagtcacaactagcgtaaagatataaattagaagaagacaattatcgataattacctggccctccttcgccatcatgtcagcataggccgccgcctcggccatgttcttcactccaggaacctggcagttcctccttttgatgtggcgaagcaggtttgctaacccagccatgttctcaacgatcgggtgatcacggtcgtgagtgtaagaccagtggaaaggattaacagctcaagttccgtctccgagagagtaacttccttggtccttgctgcaaatcatcaaaaacaaacaattagtttcagtactaacgtccagcaaaagcagtcaaggattcgacacaaacaacaaagaaaaatcaagaggctcaggtctccatctgacccaggttggtagaccaggtccttgttatcctcgcgggatcaaaactgccaattgaatgacgatatactctgaaaaagaagtacttggatcgccatgataccatgataaatcgaccattttttatatattttttttttctttggtgttctttctctcccccagacttattctttttagagagtaaacaaaggagaactcgcatactgaatcgacaccctcgacatttttccaacctttgtaattgatcatttcaaatattgtataataatggggtcataagaaacattcctacccctatacactatctgaaaatcttctcaatctctcattatatttttctttttataaggggagaggaacacattcttactatcacattggtctcaatatctggtatgaacaaggagtcaagatttatgagtactaactgtttgaagaggtaaaaggaaaagcagtgatattagctccagccttagtggttgtgttggaaactaggatttcctcaagtctgttggtttgccatctagatttttcaatagtcggattgactcgaacctgtagcactcatcatttaggcaataatcaagagaaatatagatcatgattcttaactaaagtaaagaaaacattttttttttgtttttgttttttttaaaaaaaaaaaaaggaaagtgactcaataaactcaagaacgaaaaataataagaataaaaaataaaagcataattagtaagaaccttccccacacttagacgacattgtctccagtggcattcaaattcagagaaagcggaaaaaagaaatcaaaaataaaagaaaataaaagagagggaaagacaaatcaaaccagtgggttgcctcccactaaacgcttgttttgagtcaatagcttgacttgacggagttcaggatgtgggtggagtggtggaggattgctgctacctccttgccttccaaggaggtgtttaaactgatctagatggggcagctgcgggtgtcgatcgacactcttctcgtcacctgcaagaacaacagaagaaacaagctttcgaagaactctaggcttgttatctagtgaagcagacttcgaagaatcgaaggtaaggcaggagaacagatagaagagaacttatcacataggtcctcaagatgtgtgggctgaagagaatgtgtagaatcatctgtcaagtggtggtgttgatcgacaccgtatctctacaactctcattggcgagttgagctgatgggagcgttgtgtgtggctctgttgtgggattctgagcagtctgaggagttgtgtctatactggaagcaatgctactgatagttttagtaagctctgaaccatccatgccaaacttcatctccaaatcagaaacctttagagagattttacctctcttcacatcaaacctagcaccagctgtagctaggaatgctcttccaaggataaaaggatctttgggttccttctcatagtcaaggaccacaaaataagcagggataaaagagttactgttggagctggattcccctccaggaatccacctgcgaaaataccaagccagcccacaaaagcccaccaagcccactaagtaaaggacctacgcagctgacgagcccacatatgcgaatgggaatttgggccagataagcccagtcacctgatgcatggagataagcgaataatgacctaggaattgacaaggagatattcacgttgcgtacctgatatctccgaactaacctgccgaatatccaggaggatctccgcagatcccggacgaagcaaccacgtgtgtagacctatataagggagcaaggacgacttggaagggacattcaatctagttcacattggcacacacacacttttacacttgtaatctcttttctcattgtaaaagctttgtcaaaatcaatacaaaagtccattcgttcttagcaatataactctcaaggtttcagtgaagatctagccctcctttctcataatcttaagtacaaatctctattgtggatttcagaacccacagttaccaaccttaacaggaacatcttcaaggatttattcagcgattcttttggaacgatccgcgaaggcctgtagttagtcatgtctagtctctcagcaacagacttaggcatgaggttgatacttgatcccagatcacaaaaagagcaggtgaacctgcttgtggagatagagcaatcaagaacgaagctacctcgatccggaagctcctcagtggtctgatcaagagtgatggtgcggatgtactcagcaatgtccactctctgtgccttttctttccttaccttaggcagcatgattgcactgatgtccctggtcagcagcttagcttcatctaagctaataccattctcaacaagtcgcttgacatacctgttgagtggaacagaagatgtctcagaagcatccttagggaaagaagtgaggatcttctccatgatggctatgcacttagcagcatgaatctcctgcttagaacgacgcttcctaggataagggataggaggagtgtaaacaaactcgggctgcattgggatttgcacctcacaaggtgtagtccgcatccagtgttgatcgacactagaggggtatcgatcgacatcgtcgtattgagtcgtcttagaaaagagtgtcccatagggtgtcgatcgacactggaaggtgtcggtcgacaccatatctgcaactgcgagctccaacttgtcttcagtgtccaattcttcccacacatcatccccttctgtgatcaagatggcattacagctcttccttggtttagcatcaggattaccaggaagaaagccctcttgtctcttgattgattgtgcagttgagctacctgtacatccagcttcttcaagtgagagctcagattgtcgatcttcccattaagatttgtttagacagcatcaaacttgccattaaactccagaacgagctttgttttgttctctcgaatctgctcaagtatagattttattcttgtctctgatgagagtggagggggggggcttggtaggctgaattaccataggtcctctaaggaaaggtcttctagaaagccggcttgggagtatagttggaggaactctggttccctgtaaacctgttgccattgaagttgccttgtggttgtccaaacttcatgtagctctaaccatcgatgtagaagactccctcttcagactcagtctcaggctcaatagtctcatcttcagctgcaaagtggacatgcttcttccttgtaagcaagttatgaaccaaatctagcttagcattcacctctgccatctgattgcctgaaacagctccaacaatcttcttcctctcgaagtctgtgttcttagtgatgttgctacaagcaagattctctatcagagctgtagcatcaattaggtaacgtgtgttgaagttaccattgctcgctgcatctagagccatctggtatctctaatcgactcctccgaagaaggtaccaagaagttgtacctcactgaaaccatgatgttggcagtcccgttgatactccttgaaacgaacccaagcaaccttgaaaacttcagctggaccttgtgtgaaggtagacagcatgtttctcaactcctaagacttagcatcatcgtagaaattgttcaagaaggctatcttgatgcttctccaagtcttgagggaacctgctttaagttgtttccgccaagaagcggcttctccagcaagtgaataagggaaaaacttgcacagtaggtagttctctgagactccattagccttgatgcttagaacaaggtcctcaaagcgctcgatatggtccattggctgctcatgagataagccatggaaaggatgctggcctactaaagcaaagtagctaggcttcagctcaaaatcgttcctctggaagggtgggggtacgatcattgatcgattagcataaaacaggtaaggcctgttgaaatccccaagagtacagcgtgagtaacaaagtgaaagtaaaaactagacgaaatctctaaactaaactcaatggtgattcccaagaactttggcaacggcgccaaatttgatacggttcaaattaccctaagaactactctctcaaaaaagagatcagttgcagtatttaaggattgatttccacaaagttattttgttaaaacaatgagtttaatgtcaagattaagctagtagggtatgaatgaaataaaatgagaacaaagtaagaaaacagcagattgattgtgtgtaaacgattaaataaaaggctaggaacagggtattctcaggaaactattggttagtagatctaatgaaagctaggttgttatcgaaccattcttaaactcaaactctaattatggaataactagcggtgttttgcgaaactccctatatctatagctaagaataaccggagaagccgagagattataacctaaatatgcattcttaatgagttcgattgttcaccttagtagataggccgattcttattacccacctataaaccaggttcatcaaataatagatccaactatagatacctatggtgggcatatctattgtctggattcaagacctagttaattactctagatctagcattaaacataataaagatgaagaattctagagataacctagcagagggcgcgatctactaaccatatggatccctaatgagaaaccctattcctaacgagcagtttactcagacatattgattgtaacaaacaacatgattgaataagaaagcataaacacaacaaataagataaggggagggaaagaagagatctcttcactgtattaagaactgaataaatctatgaaaccactcgatgaatagcttctgtctctcaataacagggttttgcaaaaacaatataaagaccatataaaatgtccagggactaataatgcaaataggaaagttttctgggaaaaatttcctcttctgtaaacttgaaagcgtcatggactttgttgggccaaaaatggtgtcgatcgataccaggagtgtgtggatcgacactctctctgatttctgaatccaaaatcgtccttagcttccttttccttagcttttgctccaaaatgtctcctaatctccattgttgtcccattgcatagaatacctgaaaaaacactaaaaacacttgagaaataacataaagactcaaaatcttatacctaaaacatagataaaatcagtgataatagggatatatcagctataaacatccaacaagaagatgagtctccaacaagttatcagactcccaatattgaggacaatatggttcaagaaagggggagattcaactcaaattgctgcacctactacccatcaatttatctggactataaagcacacacctttgctgaatactcaccattctggaaaaaaaaaattaagagatgattagtagagtcatcactcaagaagcttacaagaagaaagtcatccaagaaacgattggtgatcccggttcattcactctgccatgctccctaggaccattgacatttaataggtgccactatgatttgggagcatctgttagccttatgcctctctctatagctaaaaggctaggagtaatggaatacaagttctacaacctaactttactagttgatggttctgttgcacatcctcatggtttaatagaaaatctgcctgtcaagattggaaatgttgagatacctacagactttgtagtgctggatacaaataaagaaggaaaggatcccctgatcctaggcagactattcttaacctcagctagagcaatcataaatgttaggaatggaaaaattgatctaaaccttgaaaaaggtatcaagatgaaatttgacatgagcaaagcttcaaggaaatcaacattagaaggtcaaaatttcgggattcaggacatggatgttgatgtagaaacagaagctgaaaacccaccaagatttaactatacttctcaactcagcaagctgaagagaacttttgaccactagaagagagcaacagcatggttagctcagactgaagaacctagagaagatgactggtatgagatgagaaaaaaatttaaatggcaaagcagagtcatagaggggttatcttcaagagtgatgaagcttaaaggtcaactttggattattgaaaaaagagttaataattattcaatgggtattgatcgagagaagatggaaactgctctagctatcaatgaggaaaatgagtttgcaacagaatggtttgcaccagaagatcagaaaggagttcattttgagaaaagaagcttagagagtaagttgttgagtgaagaggaaatccctattccgacttattctctaggagtgcctaaactgcccaataaaccctctgctgaagaagaactcttgacacttgactttgttactgaagaaggaactcagaatataatacaaagcttaggaggatacaattgggaagttaacttacaagatggaagaactgaaccatgcaatctttatacttcaagaaatggttaaaggctactctagttttgaaactgaggattggtcaaaggaagagtgttctgagccatgcgattgaatgacgaaataagagaagcttcatcaccgtttgatcgactaaattcatgaggcttattctagtccgtttgatcaagcgttttaaagagtggagaaccctccaccatccgatcaagtattttgcatttcaagggatactcgatcctttacgcgagctcaaattatttggagaccaaggagtgaggtcgagtgtcccacctgttccccttcacttcattactcgataaacaaaccaattacccatgctcctcactgtttccaatcgactctcctatccatccaaaagagagaaccgaagacaatcgtcctccacccattgaaatagccaaaccatccttcaaaactctctctttcgtcaactcattttcgcaaattctctatctttcacaaagcttcaaaattttcattccaaacttcccctatcactcctcaagaatccgttctcctcttcaccatacctcaccaaagttactcgatcattccaaattccatcctcaaaattccaaccggttttttaagatcaaatttcatcaccaaaaacggaatactttccaatttgatacctcttggagagttgtttttgattacattgttgaaactcactaccaatctccatggattcaagaagaaagagttcatctcgggctagaagatcctctgttgataacgaaaaagttgggcatttgacatgagtggcatgactgaacgccaagctcgccgtgctcaaaggtcaagctcgattcaaggaggaagttccagtcactcagccatgcaaagagaagaagtagctaggggcaagagggtttgttgaggctgaggaagaacaccatgaaaaagcagtctttgaagaagcggtttctgaggaagaggttaagattatcggggatgatacaccagcccctgttgggagaagaaactggccaaggaataagagagagccaaccccaagcgagtactatcaatacttgaaggagttgaagttcgagggaactagataccctcataaggaaacgatgcaagagcttggtatttgtggggatgtggaatacttgatggaatcggccaatcttgtaacgttcatgagctgccaatttcggggctttaaagaggagagctgtcaactccttgcaaccctcatagttcacttttgtgttgatgattcagagaaagaagaaagaggaggtcttgattacataacattcaaagttaaggatgtcgagtatacacttgatattacccactttgataccatttttgggtttccaagtggagaaggaatccgccaagactatgaccaagatgagctactctctctctctttggataacaatcgccggtccaaagcctagtcgctcgccaagagcaagagttcttgaattcgaagtcccgtgattagatatctccaccaatgcattgccaacaccatctttccaaagaagaccactggatttgttggtgaagaagagctatgcatgattgatcaagctttggtcttcattctgagagagaccaaagatgggaggaagaaggtgcgagatagagcggacacatcgctgactgttgttcatttggatcatctattgagctatagagagtatgctgcaatgatatgtctataatttgcatgatttatgcattcattcttcaccactttgtcattgtttcatccacattttatctcattaggagtcgttttagtgtgttttacatacttaggacgattttccattaggattgcatgtgcatggcatatttggttgttttcaggtactctggatgcttttggagttcaaatagagaagaaacagaacaggaagtcagaatgcccaatgacgccttcagcaaaagtactctatcgcagcctcggagccttgccagggcaaatcactctatcgcaaccccggagaagctagcagctcagtttcactcaatcgcgaagcgggaggaatcaccccatcagaaccactcgatcaccactcgatcaccaggaggcctatctgctcgtcctgcactcagccagacaagctgagaatgaagaagagaaaagaagccgaagcaaccactcgatcaccacctcatgacatccactcgatcgcactcgatcagagggtcgctggaccattcaatctcgacttcactgcatttcactcaatcccaaggcggagcccctgaagcccaatatgatcaatgacatactcgatcacagggaggctcatttcagcccatcagatgccaatgacacattcggtcgcagggtcatgacgtgaaaatttgctatatatctagtttccgtatttgtttcatgtctcgcttatataagtagccccttagggttttccctagggcatccagtttttcatcatgtttttcatcaacttttacatttcgcaactttcgtagccgcagtgtttctcctgcgactttgtattttcactttcagtatttgatattcagtttttcgtttaagtctttcgtcatttctgttatcatgtttttaatcgttgctttgctattgtctttcattatgtctgagtagtgaaccgtatttctgaggatgggatagattagttgtggtttacttggtcgttgtaggtggttgagtttagaatactagaatcccttctggagtagttgcgcttattgcttgtttcactggctaatggggaatatgagtccagacgtccagcgctcaaaaggcgtttaatgggcgttggatcctattaatctcagagatatctgcctctaccccaaggctttaacaagttgattcgataatgcctgcttagttagagattgctaatggcaattaggtcagtgtctagctttgcttgaggatttctatcacgggagtgaattaatttgttgttgaacttgttgtctagggatatcttctgtgaagttttgtcaacagtctggatagattaaggagaccacactattcggttaccccatccttaggaatcatttatccatttgactgcatgttatcatttctattttgttattcacctgcctgttattgccatttctgcttttagtttcatttcatttctgttttcgcatattaggactgttagaaccaaccaactctctgcttggcttgacttagaggtttctaatcatatctcatctgtttgcatcacaccggattggattgacaacctaaaatactacaatgacaagatagtgttttaggattaattgagtaaaatcctactatcatgcaaccatccatcgctcggggattcgcggaagcctttgtgttggtggtctcttaacaccaatcctaggagcagcggggatatacttgggaacccgtgacgtgttccctaagttcatcgacctcgattacctcaggggaaaggattatcttgacaagacaactctggtggatcactacatcttcaagttcaaccatctggagcaagataccaatgaattcgagcaagctcactatgaagaagatgttgatcaaagaggagatgagatagttgaagttcactagaagcttggtgtgcttgaagactttgggaaccttcacagcaaaacgatgaaaggtttcaaaaagaagatgagaaccatgaagaagtcgctgaagagtatggaagctgaaataaaagacttccagagcaagccaaggcccccgtctcccaccccaaagtaataagaagcggttctgcgagcttagatgcaaggagggctgacaggatcgatcgaccctgagcttcatcatttgagcctcggaaagtgatctccgatttgagagagccaaggagtaggcagagaagagcatccacacgctcgaccaactactcgaccagacaggacgagcaaacccttccgcctcaacatcagtccctgcttatactaaagaaagtaaggacgagttcgtatccgtctacttcacctgaccgatgaggtaacaccaccacctacattgtacataccatagctttttatttgtctttgtgtgttttgtgttgtggtcttgaattctttctcagattttttgaaatttttttcagaaaatgatttcatcaaaaacaaagtgtcatgtagattgcatttcattttaggattgtcattttaagatgaacagactcccatttacccaatgatatacagtgtgaaagctcagaagatgatccaagtcccttagatgtcctaactctacacttattcccattcttttctcttttttggttcatgttgttaggggtgtttcttgaacgattcaagagtctagcgggtttggttttgaattttaacaaacttaagacttttcttctaatcttatagcatagagggcgttttacactttctttgaattacaatgcctaactttcttttctctttgaactccaaaccctttactagactaacacatttgaatcaccccttaatatctctaaactctttctctctcttttttttcttttcatttccattctctttttgtctcaatccatacaccatcccagtgaattaaccagttattaaacttgttgtctagggatattttctgtgaagttttgtcaaccccctaaatagattaaggagaccacactactcgattaccccatccttaggaatcgtttatctatttgactgtctattatcatttctgctttgttattcaccttcctgttattgccatttctgcttttagtttcatttcatttatgtttttgcatattaggacttttagaaccaaccaactctctgcttggcttgacttagaggtttctaatcatatctcatctgtttgcatcacaccggattggattgacaacctaaaatactacaacgacaagatagtgttttaggattaattgagtaaaaatcctactatcatgcaaccatccatcgctccgagattcgcggaagccttattgtttgtggtctcttaacaccaatcctaggagctgcggggatatacctgggaacccctgacgtgttccctaagttcctcgacctcgattacctcaggggaaaggattatcttgacaagataactccggcggattactacatcgtcaagttcaaccatccggagcttggaccttctttgttacccctaccttgcgagaaccaaacttcagtgaagacaaggcataacatcaacttcatgccatctccctctgccatgaaaatcgacatcggaggagctagagaagctcggtgtgcttgaagagtttgggaaccttcacaacaaaacgatgaaaggtttcaagaagaagatgagaaccatgaagaagtcgcttaagagtattgatgctcaaataaaagacttccagagcaagccaaggcccccgtctcccacccccaaagtaataagaagcggttcaacgagctcagctacgaggagggctgacaggatcgatcgaccccgagcttcatcatttgagcctcgggaagtgatctccgagttgagagagccaagcagaggcagagaagagcatccacacgctcgaccaactactcgaccagacaggacgagcaaaacccttccgcctcaacatcagtccctgcttatactcaagaaagtatggacgatttcgtatccgtctacttcacctggccgatgaggtaacaccactacctccattgtacataccatagctttttatttgtctttatgtgttttgtattgtggtcttgaattctttctcagatttttattacacaagggactgtgtaatttaagtttgggggagggttcaagacatgtttgacattgtgttctcttttcttatttcaaattttgcatcatctaaggcatagaaaaaaccataaaaatttgaaattttttcagaaaatgatttcatcaaaaacagagtgtcatgtattttgcaattcattttaggattgtatatagagtgcttgtatttaagattgctcatttgcattggagataatgatgatttcaaaccatgagcatgtaaattcaataaagtaagttcaatgcccaggtagttagttctttgttgaataaccgattgtttctctgaagtaagaccgcaccctactttaaatttacaacttgactatactgctttgattcaaaactcgctaatctgatgtcattccctactattagaacctgaacttaatttgcaattatcaggtctatgcattgtttgtgaactcatggctaccatatacatacttggattatcttattcacttcaccaccctttgttaatccaagtagctgattctcatctttaaagcagtttcccataccctgagtttaaccttatttcaagccaaagatcattttgtgtgtgattgtgaggtcttttatgattgagcttagtataacgtgttaggtatgagccgacaagagcagtctttcatgtagacctagcccacactttttgggttagctaggactaggtggagacttgtatttgggattgggattgtgtatggaatgattggaaaagagaatgggaatgaaaaaaaaaagaaaaaaaaaagagagtaagagtgtagagttctcgagggggatacaaaagaaagtgttagtctagtaaagggtttggaactcaaagagagtacttaggcattgtaattaaaagaaaagggtaaaacgccctctatgctataagtttagaagaaaagccttaagtttgttaaaattcaaaaccaaacccgctagacttttgaatcgttttaagaaacacccctaaaaacatgaaccaaaaaaagaaaaaagaatgggaataagggtagagttaggacatctaagggacttggatcatcttatgagctttcacactatatatcattgggtaaatgggagcatgttcttgtatgtgtctgttgactctaacatttaacattctgctaaagctcaatcttttctatgagagtccagtgttactcgaccaattcattaaagggaccatttttgtctcttagcttaagcccgaaaccaaatgagttcataaccattgcattgcttgatccattgtttgtgcttaatgaatgttaaagggaatcggtagatgtgagtgcttgaatagattaaagcaggttgttaggttgcattgtgacgagtatggctaaagtttttaagtaaggatctatcactttgcaatctagaattagctacctggacattgagctcacccgttctatatgcatgcttcggttttgaatccccaccttcaaacctctccttcaacttaagattttttggttgcttgagggcaagcaagagataagtttgggggagttgataacactgtattttactcattctggacatgtatttatcatcttttagcttagtgattactcattgtttcatatcattttgcatcacatttagcttattttgcacacttaggcatttaggatcatcgtgcatacatattacatcctttggtgtgttttaaggtccagaaggagcttacaaggaatctactcgaccctctactctatcaagccaggagggaagcaacagagcatttcactcaacccctttactcgatcaaggcagccacagaggaagtagcagatcgatatactcgccccttttactcgatcctctactcgaccagtttactcgatcaagggcaacctactctacaagacttgttgatcgttcaaagcgtctcctgatcctcctcattccccactcaaccagacatctgagcataagaataggagaggaagaagcaactactcgaccaattgatcactcggagcatggaggcaaaggcgaagactttgcagcatcctctttactcaatctccaagatcgaacattcgtccaaaccgcctcaagtatctagtcttctagtgaatctagggttattaacatttcagtataaatagatcactttgggatttgtccaaaggatcaatctttttatctcttagtttttctttgtgttcgtgaatcttaaaaccttaattactcttaatctatttcgtttttgcatttagttctttgagcaaagttatttatcttgtttagatgtacatttggatatgatttcagtaatttctgggtttgtgtacttcattatactacttgagtagtgattagggttcttgaggatggattagattagggtaatctataggttcgtcagtggttaagattatgtttgatcccttctggattcgttggcctctatgcggtttttgctagctaatgtgggaattcgatcataggtatccagcgtccaaaagacgttcaaatggatgcctgatctacgaattccagagatttatagattctagcccaagagattggatgtttagactgcttattgactttggtagattgttgcttaaagccagctctgctatgtttcatcaacgagagttgagattaggaagcggtagagttatgagggtctctttgacgagagtggattgacctggttttgaatctatcgtctagggtatctgcctttcgcctgttagccacctgataaaccctagagttgcccttatcaatgaatcaatccttaggacttctattcttcttagatttatatgtattcaccccatgattgcagttttattcatatcttatctgtatcacatgttgattgcattttggttcttaaatttgttacctgttggttctactcggcccaataatcgagtagggctcttaaagttctcatttttgttgtttgaatcctgatttaggattgttattagaaacccaccatcactataacctggcttgacttagttgcttttgtatacatcttgattgctatcaataacaatgaactggattgacaccccctatagctgcatcgacatattagtgtttaaggcgaattgaactgaacctcacttcagcacataagtaggcgtaaaaatctacttatcattgctctgctgcttccctcctggtttgatagagtagaagatcgagtgatttccttgtaacctccttctacacctgaaaacacaccaaaacatgatatatgtatgtaaaaagatcctagatgcctaagtatgcaaaataagctaaaaagatgcaaaatgatatgaaacaatgagtgaacactaagttaaatgatgataaacacatgagtaaaatgagtaaaatacagtgttatcaactcccccaaacttatctcttgtttgccctcaagcaaacaaaagatcttaagttgaaagagaggtttgaaggcggggattcaagaaccgaagcatgcatatagagtgggtgagatcaatgtctagttagctaattctacgttgcaaggtcaaagatccttactcaaaaactttagccatactcatcacaatgcaacctaacaattgtcttaatctattcaaggatttacataaaccaattccctttaacattgattaagcacgaacagtagatcaagcaatgcaatgactatgaactcatttggtttaggggctaaggctaagagccaaaaatggtccctctatagatatggtcgagtaataggtgactctcatagaaaagattgagctttagcagaatgcaagaaaagactcccatttacccaatgatatatagtgtgaaagctcagaagatgatccaagtcccttagatgtcctaactctatccttattcccattcttttctcttttttggttcatgctcttaggggtgtttcttgaaacgattcaagagtctagcgggtttggttttgaatcttaacaaacttaagacttttcttctaatcttatagcatagagggcgttttacactttctttgaattacaatgcctaactttcttttctctttgaactccaaaccctttactagactaacacttttgaatcaccccttaagatctctaaactctttctctctctctttttttcttttcatttccattctctttttgtctcaatccatacacaatcccaaccccccaaatacaagtctccacctagtcctagctaacccaaaaagcgtgggctaggtcaacatgaaagactgctcttgtcggctcatacctaacacgttataccaagctcaatatcaaaaagacctcacaaacacacacaaaatgatctttggcttgaagtaaggttaagttcagggtatggaaaactgctctaaaagtgagagtcagctacttggattaacaaagggtggtgaagtgaataagataatccaaaaatgtatatggtagccatgagttcataaataaatgcagacacatgataattgcaaattaagctcaggttctaatagatagggaatgacatcagattagcgagtttcaaattaaagcggtatataactataagaaaacctgccatttgcaactcccatattggtcccaaaatggtcgcaaactaggtgtttacgactacttaacgacgatattagaaggtcgctaaaaaaccgtcgctaaatattgcagtgcgaaattggtcgcttatgagcgacgaattttggacacaaaaggttagtcgtaaataagtgaattatttgtgacaatatcaagaagtggcagatatgcgactaaactgcaacgatgtacacttaggtacatatgtgacaatgtagttgcaaaatagtatttccctcttgcgactaagttacaacgccttataatgtaatcgcaaaatagtaccgttaaagcaacgattgtgccactttgtaacaattttgtgtaatttgatttagtcacaaattggttacagttttgtaatgtgtcggtcacattattgtcacatattttgaataagtttggtcacaaagtggtcacaattatataattggtttggtcacaaattagtcacatgtattgttttggtttagtcacaaattggtcttatgaatggaatgataaacctcatttatatcgattcaaaagccaataatctctaatcatgttaacattaagacactaattatgtttacattcagaaaaccatagtcatacaaatcctaaacaagtttcaacaaaaacaacaaaaacaacaaaagcaacaaaagatcaagtttaatggttagaagaagtgttagaaatagtaggtgaagtggagactaagggtgtggtgcctacaactgtgatggctagtgcggtgtctgtggtggttggaagtgtggatggagttgtggtggttgaatgtgtgcctggttcaggttcagtagaatcagttgacaaataagcagccaactcaggatctttttctttcatgaagaggacgagcttctccaagttggctatccgagattgagattggcagtgctccacatcacgttttgcattttgctcctcttgttcagatatcttgagctgtagctgctcttgaagctgcacaaccgttgatgtagaagagctcgcataactctctttccttcttcttttgtttagtgtctccacaagtgatccaaggccaaaatggttccttttgccatctatgtgagtacattgaaacgagaagacaaatacaatcaccaaagacaatcataattactctaagtatccattgctcataatcaatcataatccaagcaaacaaagacaagcaaattgtaagcaaaataaaaacagaaataaattaccttaagaaaaatctcattcttttcatcaatgttgagcgtacgatgagttgaatgttgcgaggaattatcagaaacttgaggaccatcctcgtccatttcagccatcctctcttccatcatcttcatataagcctcaccaacatgctgatatatctgatctacaaaagatccatcagcccttgtatgtgtttgcataaacaattccccatatgatacatgacgcttcaaacgttcctcctgaccaagaaaattaaacagaaaaagacaagcttatgtgaaggtaataatagaaagctgttaagtgaactgtttggatggaaagacaactcttaccatttcttgatgaacttgcacaaaagatttctgaccggctaagtgtttgtgcaccccaagacctccccgatcttagtttctacagtttgaagctgtttcacttttcagttgagcatcttcagtgttccaatgcaccaacatctgtttccaaagtgtatcacgaatccacggtggttgttcaccactcttctttgcttgactgacaatccttttcatccttgtcttggctataaccaagaaaccttctttaacgagctcagtaatgccttgatcccaatatacttttgctacataacaagcagctaagtttgcaaagatagtaagagtaagtcaaagtaaacaataatagaatgaaaggtatttaagacattaccgcaaaatttctgaagtatttcttttgagtggctattggagtaacctaccaattgaagtatggcccatcgaacttcctcctaaatatgctcaaaatcactttagacagctttccattgtggtggttaaacctgtaaaaaaaatatgactaagtattaagcctatgtcactgtaggtaaaccaccaagacattgcaaatataaacataatcgacttagttgctgcaaccaacagagaattagcaaaaatgaaatggttttaaaacaaaaacacaaaacaaaaactcgtagaccaaaagagagactgcaaaacaaaacaaagactgcagaccaaaacaaagactattttaaaacgactttaggtgagccaacacttaacattacaagcagaccaaacaaagactacagaccaaatcgacttgccaacacaaaacaaagacaagcagaccaaaactgttgaccgcagaccaaatcgactttaggtgagacattgtttaacaaatacaaacagaccaagcacaaacttcagaccaaatcgactttaggtgagccaacacaaaacaaagacattaagaccaaacaaaaactgcagcccaaatcattgcgctagagccaacactaaagccaaatcattgcactagagccaacacaaaacaaatagtgccgtccaacacaaagaatccagaccatacttagctttatcaccatttcataatcttcatctgtttctagaaggagagaattatagagcttaccaaagagtctcgactcatggaataggctcttgagacagaatcataagatgttgtcggcctggcaaggcaagtaagcgatccaacagctcttggtagtcgacattagggttttgttcttcttcgtcgacttcctccccatcttcttccttgaattcgtccccatcttcttccccatcttcctcttcatgattattagggttttgatggtttggtatgaactgtgtctctggtggatcctgagaaggctgttcttgaagataaggaatctgatgttgacaagcaagaggttgttgttgctttcgacgaataagaggcggttgttgagagccagattgcgagtgagaacgagcaggagtcggggtttgtatcgtttggggtggtgacttatggggtcgtgtcgccggctgatattgggaaggacgaattctatttgaatgtgtaacggagattgtcgtcacaaagaagtaactatattttatgactgaataaaaggtcacaactaaccgtcccaaaatgcaggttttcttgtagtatagtcaagttgtaaattcaaagtggggtgcggtcttacttcagagaaacaatcggttatgcaacagagaactaacaacctgtgcattgaacttacttcactgaatttacatgctaataggtttgaaatcatcattatcccctatgcaaatgagcaatcctaaatgcaagcacactatatacaaccgtaaaatgcaatgcaatctacttgacactctgtttttgtgaaatcattttttgaaaaaaatcaaatttttatggttttttctatgccttagatgatgcaaaatttgagttaagaaaagagaacacaatgtcaaatacgtcttgaactctccaccaaacttaaattacacagttaataaaaatcaagaccaaaacaaacaacaaacaaagaaaaacaaaaagctacggtatatacaatagtagtggtggtgttacctcagtgatcaggtgaagtagacggagacgaaatcgtccatactctcttgagtataagcaggaactgatgttgaagcgggaggattttgctcgtcatgtccgatcgagtaggttgtcgagcgtttggatgctctcctctgccttctccttggctctctcagctcgaagatcacttcccgaggatcaaatgatgaagctcgaggttggtcaatcttgtcagcccttcttgcagctgaactcgtggatccgcttcttcttactttgggagtgggagatgggggccttggcttactctggaagtctttgatttgagcagccatgtccttctgtgaaaagcacccattttagtgatatagagtatatacagaactttaggtatataaatcatcggtttcgtaacttattttagaacttgtttaaaaatatcaaacatgacaatgaaagaacatggaacttatgatatagattaggtttttttgaatgtttcgtttgtaaatttcagaattgaagtgtttggttatgtttaatatcgatcaaattaaagtatcaacgtctaagaaaacatataaacaaaccaaactttaatatttcaaacccaaaaatcgatagttggtaatacgtaggtaattggttgcaagatgcgacagttttcttttttcgtcgcaaataaggtgcaaagaggtactgttttgtgatattttggaaaacttcaaaagacaaacttttgaaatccacatagtttgatccaatctattgttaaatattactgaaaagcactcattttagtgatatagagtacatacagaactttaggtatatataaatcattggtttcataacttagtttagaacttgtttgaaaatatcaatcatgacaatgaaagaacatgaaacttatcatatagattagttttttttttaatgtttagtttgtaaaattcagaattcgagtgtttggttatgtttttatatctaatatcgatcaaattaaagtatcaacatataagaaaacatataaacacaccaaaactttaaaatttcgaaacgcaaaaatcgagagttggtaatacgtaggtaattggttgcaaagtgcgattattttcattttttgtcacaaataagttgcaaagagcgactgttttgtgacgttttggaaaacttcagaaaacaaacttttgaaatccacatagtttgatccaatcttattgataaaaattactgaaaaacacccattttagtgatatagagtacatacagaactttaggtatataaatcatcggtttcgtaacttattttagaacttgttttaaaatatcaatcatgacaattaaagaacatggaacttatgatatagattaggtttttttgaatgtttcgtttgtaaatttcagaattgaagtgtttggttatgtttttatatctaatatcgatcaaattaaagtatcaacgtccaagaaaacatataaacagaccaaactttaatatttcgaaatgcaaaaatcgatagttggtaatacataggtaattggttgcaaaatgcgacagttttcttttttcgtcgcaaataaggtgcaaagagggactgttttgtgatattttggaaaacttcagaacacaaaattttgaaatccacatagtttgatctaatctattgataaaaattactgaaaagctaccattttagtgatatagagtacatacagaactttaggtatataaatcatcggtttcgtaacttattttagaacttgtttaaaaatatcaatcatgacaatgaaagaacatggaacttatgatatagattaggtttttttgaatgtttagtttgtaaatttcagaattgaagtgtttggttatgtttttatatctaactagattgataacccgtgcttcgcccgggtgtgaaaatttgatatataaatacatgttgcgggagtttttggaaactattgtactatgacgttttaatagtattagggtatttatttattatttttttatttttttatcttatggttttgtaatatttataatactaatttattatagagaatattacagtaagaggtactttttaaaaacatttgacgtgttccaacacttcaaaaacattagacacttttccctactaaattgaccattatacccaaaattattggtcaggcatataaccgacggtttatttattttaatcaaattttagtttatagattcagtttatccatgatttactaatcaatgtcaacttcttacatagttcacaagaataacagaatcttgtaaaaaacttttatcgtctcatcgtttcccatatctccgactaattatctggcttaatttttcgattaattctccagtacaccgtcacatgattcactcgatttgattctttcattctctcagtctatttctcaactttttttacagttttataagtccttaagaaccctaaattcgactccggcataataagaaccctaaattcgactccagcgtaatcaacctctgtttgattctggcgtaagaacctaaatttgacttatgttctttgcctacaattacattctcgacttctgttcttcggcttcaaactgtctataccggtgttgatttctgcaagaaactttgtggggtctcaattattagaaagtgagcatttgaaatgtattgtatttggttaaatttgatatgataagatgcttattcttccaacttttttacatcatgtaaggcataaatttacttgtgttcttagtggtgaaagaatggaaaatgtattacatgcttgctgcaaaggaattaaaaatgggaagattctcattcaccgtgatagcgataatggaaaacaagtcttcttgttaatattttgctctctttttataagtatcaagtatagtctccttttataaacaagaattttgaagtttctcttctcatgtgaatcagcttatttatgagaagcttccttacgacatctccgaacgccatgtcctgcttctggatcttgtcttactcataggtactctgtctctctacattgaatatttcgatgttggtcctttttgatggatatttttttcttgaaatccatattttgtgatactgcttcttcgtgaaggtaactccgctaatcaagccattgaactactcatacagaacaaagttcctgaagttcacattatattcctcaaccttatatcggttagtgtaaaaagctaaagatcgctctttcgctcatttgtgaatgtagaagctaaagatctctatgtatctacttctatgtctctttgcttctctctttccctcatcgtgaccttgctttctgacaatcgttggaggggaacccattgtgtctgcaaacgttttccagcattaaagatagtgatatctgaaatagaccaatgtctgaaccaagagttcagagtttacattgaattaattagttatgtttggtctttcatggctaatgcttttttgagatttggagaatccacgataaactctagaatcaatctacatttgcaactttaatttgatcattttttggtttgatcattcaaaaatggttttagtttccaagtaccaataactaattttgggacatggatttgcaggagaagaagaaaatttggataaagttgactcgttagctttttagtctcttggacactacactaatgttgttgagaaaattatatcgcttcttttaaaaaacattataacgacttgtcgatttgtgttgagaaaattggtcgattaatcaatattaaaccttgacttatagcaaacttctaactctgttaatttctttaggcgagtgggtgaacacatcagctggacttgcttttgcaccttgtgttttcagcgttggaacagaagaagtaaactcccaaaattcttttcaatcttactcatttatcaagggttttttttcattcttcttgtctcgtttttagttatatgttccccaaacacttgcttttgtgttgatcttatattctctttaattcaattttgcagatgattccttgcattacattaaattacatcacaaacggacgtactgtgcatccatgaattcaacttaattcaaatgattggtgaccatagatgacagaacaaacaaatatggtcagctgagcgtctacttattgatgtcatccaagggaatttatccatttagacgcaaacatggatattgtggtcattctatacactatataagtatatatgtttcttgttatatcttggattagtagacaatttttgttataatgatgggagtttccatacataagtgaataaatagtcaaagaaaaatgaacgatgatttactttgaattggcgtttgaattagtgattatcgttcatttataaacttgtgtattgaaatgaaacgaccacgtaagtcacatatgaccacatagcgagacctcttggatagtcatcaatggacacctatgtctttgatttgctgcagatgtgttttattggtcggtaaaattatcaatttttgtatattagtgttttgttttacggtttcagatttagtggagaatgatcatgggttgaggggttgagtttaattttaaggtaagtaaattaggattttgtgcaaagcgttaagggtagagtgtttacacactcgtatgaaccatttctgaatataatcatatgaatatcaccatagaaatgatcctatattttagctgcacaacagaaaacgaaagatgaatcaccaaatctaaacattgttcaccaaaatcaaatacaagaacacttcattaggtggagaacatatgttcgaagagtaatggacggattcctatagctgacaatccgcaagtaaatgttcatatatgatatttagaagtagagatgtatccatgtaacatcgaccagatggatatagtttaagaaatgacggtgtatccacctagtgccgaacaaatggatatacatttttgtgttttctcgtaaacttttcttgacaaccatgagacaccttaatagattggtgttaccaatcagcttcctcagcgtttaacctcaactatgacctagagttgccaagacactgcatgtttctctttctcactttcattcttaacatttttttcttaggtacttgactacttgggcttccatcgcagtgttcttttgaaatctgaaatattgggaaatgtgataagtccagttctcactattgttctcaaaatttaaatcaagcttttgaaatcaaccagacaatgccatattaagatcacgaaaacctcacaatggttcatgaatgtgtcaaaaaacattatcaagcaactaacatatatgagtagacaagtctaagagatattattagtagaacaaagtagcatatgaaaagcttgcagcaatgagattccagactacataaaactgcaatagtgaggcttctacactttcatccgaacattcaaaaaggaaacaacaaccgtaaggctctattcgatataaagcaagagcatcatcattaatcatcaagatatataaagagaaagtagaaaagacaacatatgcatccatagagataaaatacagttctagatgcatatcacattgcatactttaagaaatgcaaacgaaaaagacaaaacctgcaatcagacacaaaaaaggaaaaactgaaggttaacaaaagcacattttctaattcttggtttccactcaatatcaaagccaacaaaagcttttccagattcatctctcttggtttcaagaaccttaagaagctgcaatcctcgcttatcaacctcaatagtagtcttgctatacaaaatcctaccaccaaatctcattgttggaaaattcctagttgcaacaaagtatacacattattaagttgctccgcccacataattcaaataacgaacacattattatgaaaaaaattcttaattctacaaattaaggcatgaatagattaatacattgagaagatgaaaattgaaaagaaaagaacttgaaattcaaatcaaatggagaaaaaggtgagacaacgaatgaattgaatttttcaaatcaaaaagaagcagaaattgaaaaatagaagagaaaatctctgggatttgaagaggtttcttacctctctcaaaccatctatcaatatttgatgaggtttcttacctctctcaaaccatctatcaattattctcttgttataaacaagagattcgattttccttcttcccaattgaaatataccctacccgatctatttcttgtctccttcacatctgatgcatccttgcccggaagaattctcagccatcgttctttcgtcgataatgagattctctgtttaccaagatataatctcgtccgtcgaaataacaaggggacaatcggacggcctgtaattgtgaagtaactacctttttaatctccagatctcaaccgtctgttttaatcttattggccacatgctttattagatatcatatcaaacaaaaccaatcgaaccggttaagcaatagatgcttcaatttgggaaggatagaattgtctttatttcttccaaaaacaaggaaaagtgcttaaatcctgggaagtgcctaaaacgtaaaaacatttcttaaaagtgcctaatagtgtaacattccctttattataatatagatgtgttgacactcatcattttgtatagcaaattacattgtagcaaatggttgaaatattagatttattagttagagtattggagtatatttgtttttatatgcatttatttattggaaggaattttatatatgtatttagtatagtattatatattataatctatgtttgtcaagtgttagagaaattttgtttattacattttgttattttattagtaatgaagataaggtaaattttattatgaataattataagaatgaaagtgaattattttcatatgtattatatattttaattaagaattttataagttgaaaacaaaatcacaaaacaaaataaaaaaatatgtgatttctaaattattcataaatattttattctgtaaatgtttcaaactcatctatacttaattaaatacaacaaaaacaacaaacaacctatttttatgacatttttactaaccaatagaaaaaaagagtgttataattgtcaacaaaacatgctattcgataaaacacgggaatggatcttaagttcatttttttgacattgagctttcttcaattcgattgcagaattcgattcgatttactgggttttcggatatcaacaaatctgatcaacttctttctttcatcaatcacacaaattcatcagatcttatcgaattcgattgaaattttgatcaatggagaaggcgaagtgtaatggtctttcaaagtcaaaatctggtgattggagtttagtctattggcgttgtccgatttcttattcattttccgctgatcacatttcgttatgttaaatgtgatattgagaaggtaaacaaatttgaatgggattgtgaatcttgattgttctgttttacttgatatatttatgcaatttgccaaaatacaactgcaatgatttgttctttaactgcagtacggatgttctgaagtttagaggacatgacaatgaatgtttcatgatggcagtcatagaatcgataaaattcttcacaaacctctcagacaacaacaatcctgaaaaggtacatggttcttaatctttaagcaagtagaaagcctgcatttgggtgatatggttgatatatagataatttaagtaacacctgttagaatgtatatttgatagtgtaaattcttagattgaagtagcaaatattcaacaaatattgtagatataagactgacatgataagaatccaacagaagtaaaaaacaaatggaaactaaagattcttaaaaacttctttgaaaagtacattttttgtttgcttttatggcttaccttcatcattcacaatcagaatctttaatcctgactttgatgtaactctcgatatgacaacttaaagttggctgtgtgaaaaggaaggcctaggtagaaaaatacctactcttttcaaagattgtccttggcttttgttgatagtcattgcaaagcaaacagctaaaggtagttgtgttcttcgcattgtaaatggcaactttgtgtttgatggtgttggcttcaatcttggaatcaatactaaattattagctttgtcaccggttagaatcattgcttgcaaaatgaatggacccatttgcgtgatccgtaaccttgtgccattcatatgaccacctataggatcaatatttctgagcaacatcataggacaaccaatctttagacgaagcttatggttaggtaaccctgaaaatttaacactattcaaaaagtcaggagtcaatgccggattatttctaccaccaatgtcagctgggtctaaactgtctaaacttaggaatgtaaactcctctcctgaaaattaaaatttaggttagttatagttatagaagaaataggtaatagaaacactattaatataagtaactaaagtttcaaatcaatgcttctaaattagtaataaccttggaggttatcaagcatggtctcatttatttggttgacatcttcgttggtgggacataatattgctctttcttggaaaaaactggatccttttcttcatgtatttttgtaatatctccatatatttctgtgcatatggcttgtattggatcttttgctttcgtgataagaaattcagaaggaatatcgatcaaagcctccccatcattaggctcgccaattctactgtcacctactgccaatatccactctgaaaactctttaatatctttcgcttcactaacactcaaaccttcagaataaagacgcatattctttgtcagagtcaatactttacaatgaatccataggtaagatgaattaagggcatacataactatgtctgccctatcagcaccggggattacttgtagaacttgtctgaagtcatttccaaagacaacaaccttgccaccaaacggtttgttatcaccattaccacaaatatctgacaaactcctatccaatgactcaaaacagtgtctactcatcattggagcttcatcccatataatcagaaaagcttctttgactaaatttgccctatctgaaccagctttcatattacatgtagcaaactcattaggagtaagaggaattccaaatctagagtgagctgtcctacctccttctaaaaggagagaagcaataccactggaagcaacattaagaacaatgtcaccctttgacctaaatgcagcaaagagtgttttccaaagaaatgtttttcctgttcctccaaatccataaacaaaaaatactcctccaaggttttcattcactgcaccaataatgttgtcgtaaacagacttctgctctgaagtaagctttttaatcgattcgacatgtttttttgtctcactctcacgatcataccctttctcatccaaaatcaagacattagtatcaaacctaggatctttatgtacttgtggcatagtcttataatatgtaagtgaagtaccattccttcttaaaatgtgatctatctcttgtagagcatataattttttctcttcatcagacaaaattagatatgtaaacaaacagataactaaatgagttacaatttagcaaagcaagtttagcatactatattgcattgtataacaaaatgagataaaattgaagttttgaaatgatatgagatgttacttggtctgttgaaatatttccttttatcgttttgaatatcttaagagagatgttgccacgttgcagccaacacattttcaggactaattagagcatctaacataattacgaataactgacatagataccaaccactgctccaaaaacttgttctctttaaatcatcaatgtattcctgatcattatctaataagcctaatgcttcacaagcatctttccactctttatatagcacaccattaactgtctatagctcttcaaaacatcttggacttggcacaatattgagaagtattctcaaataatatccatcttctatatcacgaggaacatagtttattcttcctataacaaagcctttctttctgagattaaatttcttttctttcggatcataggtaaatctagtggggatgtctgcataagtcagcttcctagcaatcttactaactttatttaattcgaaccaagcaaggaacatggagccatctagatcagccttgtttaacattgtttctacttgatcatcgcctttgaaataaataaattgttcccttggcaaatggaacaaaagcttcatcataggagtagatctataatgtataggatattttaatattctccaggctgcttcgcaagcagaaacatatctgaaatgcgaaattatacaatcataaggaacataaataaatctatttaactggaataatactattaaaattttaattaaacatacctgcaattgaaatagtcttctacttcattcttcttctttggctctgatccatcaatatcagcattgaccttctgtttacctttttctttattttttgaatttagagacgattcaacaacaacagtaacacgatctggttctttatgaatatacttgaatatgtatttcacagaacctgaatggttacaccactccacgttgatgtgagctccgtatctcattgatagggatctattataaggaatgacataacggttatcgcatttaaagtctttcttctgaacaaagtcatctgttcttcgccttctgtatattggaaatccttctttatcaataattgttttttgaacatgatctttcggataaaactttgaacactttccgttttccatacatggacatttcgggttcaccacaccacaaggaccatgaaccatcatttcctttatcacttcaaatagctcagggtcttgtcaggaatctctgctgatataactttatcaatgtgctctgctttggtcaacttacactttgaatccagccaaattagtatatgagcatgagggagtcttcttttttgaaactctatagtatacatagctgcaattacacagaaaacatagtaattattataggtatcaaaaaatatagacataatatttcagagtaaataaaacaaattaaaatctgcttacatgtacttgtcttccctagtatgtttcttttagttaaatcaagcttcagagaatcaagtttcattttgaagatcttgcatataatctcaggtctatcctcaactctcaaatttcgctcaccacaaaacctaatcagctctggccactttggattgcaagtaaatgtgataaaataatctggaaacccaaaatgtttacacaatgtcatcgcatcctaatacatgttcttcatatatctaggaccacttgtaaaagtagctggcaaataacatgctaatccttgttctttcaaatcatgatttccttcttctgaagccttttgcacggaattataattatttgtcctcagactactctggttaagtttgatgtaaccaagccggtttgattctattgctgtataagaatccaccaagaattgctgccatagccttctaaacctaagtaaaatatgcttctcatgtttcctttcgcgaattctgaaggcaaaccattgccttatagatatgtactcgttcttctaatttttaacagcccctgtttgatgtttctcaatgcctgttctgaatcaatcttcaccataagggaacaaaagaggatattgtagaggaagataacacgggagaatttcactaattctttgtagtttccctgatttctcttctactactatatctctgcatggcatatttatagtgaagtctccaggaatcaacatggctacctctgatgccgtaggtacattatacaccttgccatccgcttcccgtttactaactattctcatatgcaaagtctgttctggattagcattgaacctgtccctagcagtccgtaagtgtgatacgtaagggttgacactattcagtaatttgatcacaacatcaataatttcctttctcaactctttctttttatacttgtcagcattagcaccattactgatacgaatcaaataagtcaaatttagaacagtaaccaatattaaaacaacatcaatgttatataaaaaaacattagtaacactataaggaatgcagtcacctgagtgcttccgatctgttatcaacttcattctctgtgtctacaatatataactgcatgaactttggaggtatatcattgtctggtctcaaactccctatcctatggtagttctctccgtgaatctggaacatttaaggaccaccactggctctaacactcttttctgtatcaccaccaagtgatgtaaaagaaaatatcatattgtaagccctgatattttctctaaaatgtctactgatttcagagtcattggttagcaatgcataaagtaattctcgtgaatttttaagaaaaggcaacttcacttgaccttgcaaacaacatgatgtaaacttgggcttcttattcttgactgtctttttaatacgctcaccatgccacattatagctccacaatattcacatgagtaaagaggatccccatgatcaatgtatactgcatttgaaaccataaaatgttaaatttaaaggataaacagagaactaatatatattcatacctggtttgttttttcttgaatttatactaaattgaagctcaaagtcttcatgttcttttcctgtgaaacataaatgtcattagagcttatagatttgttacaactttgattgagcattggaaaaaatttaatcataattcatttacaaatttattgaatataacacaccgtaagaatgttcctctacattttcattagaggtatcaagacatcccgggccaaaagtggcaagcaaactcttctcaagatcatccaaaaactcataattttttttaaccagttcagtaatcttgacattttttttttgtagttggtatatgaatcataatcaacttcatcttgaaaaccattttcaagatcatcatatatattagactctgaacctaaaaaataagaaaagaattttgttatacatcacatattatagttttttgaacagcgaagaatatgtaaataacgcaattatgcagttaatatttaccatctgattctccattactgtcacattctcctaaattcatttgatttcctgattgcagaaactcaggaagaatgagatcatcggttctgtctcctcgtccacaatgtgtgacgccatttaccctaagaggaatgtcattggtaaagtttctaaacaatcttttatccttagacgggtttgatgtctctccttcttcaaaattagttgttgtgcatggagaacttaggttggaatttggtatatgattttctgaatataacaaaacgttagatagtattaaacgacatgagatgtttcaagtttgtaacccatgacttaccaaatggatactgagaatcatttgcatctgaatgtagattatcatcatatgttaaatgccttcgatatgattgaataggacttgaaagatcgattcctgctgcattgttaacatttcataaataaatcttgttaaatgtagttatgttaaaaaagacaacatataaagcttaaatatataatatagatggatctgtaaacttaacttgtttttgatgtgaaacaagactgcaatgtgccaggcgtttgcctaatgcttggtgtatgaactctttgatttgtaatatcacatagaaccctattaaaaacaaaactaactggcactgatttcttcgcacttggtccattgaataacggaggtgtatttttagaggcttctccatgtctaaaccgcttatcagatgtgttttgaatagcattagacaaatctgaatcttgactttcaagaattttttttcctttttgacatggtgaacaaagaaaagataatacagcaaaagtgatagctaaacacttaaaaccttcatatgtgagaattgacttttctataatatgttaacctagttatgtgctcttttatttgttctccggccagaaaagattgacagaatatttgctgttgtgttatttaactaaactgattaagatataaactatttatatggaaacagttattaattggttacatgatccagtttattgatctttatctatgtaaatatggttattttgttttcttaaagagaattcgattattcaatttataatttattaagatcttttttctttttataggatcaactcgaggactaaagggaatcattgtggttgtgagagtctcaagtggtatgaattcttctcaagtctataagccattgactacttattttaaggtaaattcttgtttgttatataagaactaagttattaacatttcataggaaacttttcatttcacatagattaatatacatcaaataaagcatccttaaaccattacaaaatataatagaatccacacgttaagagagatagaaaggtacaaaaagaacagagtttaacttcaaaaaacaaaaaacaaaacacaaacttcatcatagctttagttctcctcaacgacctccatcattacatcgtcctcatcatcttcaatcatgtatccgcggctgcatttcaaaatcatcttggcaattagtaatgttaacaattaaagtataaaaataagcaaaaatatgtatacttacaaccaagttggtatatcaatttctttgaatttaagatcgatgtatagctttgaaaagcctcattcactcatgagaacattcttacctgtaatttttaaaaaaagatttctatattaacatgaagacagaatctatagttttacttagaaataaaattcaaagtaatcaccatgataatttgtgattctctagttttggagaacagcgacgataggttcataattgtaagtaatcaaactgattctctttgaccagtggttcacaaaccactcacatatcctaccaacaccaatacagattatctcgtttcccctattacagaaaactcaatatcatcactaataagattatcaatggttatattctaagagtataaatagactgagatctatttccttaagaaaagacttacacgttgttcgcaatcgtgaatttcacatatcttgcttcataatctgtctctctttgacgacatacaaatggaaatctcttaatgttagaaacccttgtaataatacccattgcatctgaaacgtttaatatagagtaagttgttaagaatatatgacaatagattcagttgaaaataagttacagaaaatagagtaccatatgatctcaaatagaaaataagagattaccagacagaaactccatatcctgcggtgcagcattctcaacatcactcggagccgcaaactaaaaaaatctacttgttgaaagtgaaggaacatgccacatggttgtttctctgagaaacttgatctgttttgaacaaaatgagtatctaacaggcatggtattaaccacaactcgaaagtcggacatgtaataccaaaaaccctctttgagtacatccttgtacttccacagaatggtgccttcttgaatagtagcatcaattcgattatactacataaaaatttcaaaattattaaatttagaaatttagggtttcaaattccatcaagtcacagtgtaagatatgctaatttatacaattacctttgaatcgatcagcataatcgtggtttcaacaccatctcgcggtggattatgatgacagagaccaagaatctccacatagacacgccatttagtgatgtgaacacctatgtcagataaaaggttcatcctctccattgagattgataactcctatcggtctctaaactagaggaagaatctaagaaattaaaagaagtctgtaaacacaaacacggaattgtctattttatagcagattgaagagttgcaatcattgagaaaacagttctagaacatccaaaactcgagaaactgaaacgttatatactgattaatattattaatatatatataatatctgattttaagtgtaatctttacatttttgttatttatactaactgaatatattagagagtatattctaagaatattttagttaagatatcatatattgttatggaaagattatatacatattgatactatatatgaaattataatttaggcttgtattggaggtttcgatgtgttataattttactttttatgtaataaaacttgatttaaattacttagttcatattaacattttttttttcttgtatacagatgaagagctaagagtggaactcatcatctccatctacggttagatactaagaactcttatattgcataggtatattttctgtaaatatgaactaagttattgttatataaaatagccggatatttaaaattttcaactattcattttgaaactctacacttgatttttacctgcttaaagaaaatagtaacttgcagtttcaaataggaaaaagattaaactgaaaccatctctaccaaaaagaacacaatgtatgataagtcaaacaaacattccaacaatagttcaatagataaaaccaaaatcaacttagcaatgaacagttttatttttaaaagcaatgtaaattgcttatacaaatccttggaaagacgaatctgactctaggattagtcctcagcaacatactcaatcctcccttcaacagacccatctggttcatatccaaaaaaaattgctgtaacaaaaatataaaaagatgtcattttgacttgaatagttagtatctaatgaacaaaagcaaattatctaatgtctttcacatacatgtaacatgttacatcaaagtctggaaaagatatctcaatgaagacccttgaacacccatactcgctgattaatgccttagatcctataatatttgttatcattctgttgattagttatagatcacagggttttacatttgacacgaatgtgactaacatattaacgaatttccactaacccttaaacatagaggttctaaagaaccggaggactatagtgattggctcgtagttataactttttatacctataagtcgataaaactttgacagaaaagactcacacgcactccctctagcaacacatgttatgatcctatcactacaaccaatgaaaatacaaatttatcagactacacatatacttctgttcctaacgaatttcaataccaatatacatccatgattgttaacttacagattatctctgatggtaaatgtcacatatctggcctcatagtctgtttccccttcacgacaacaatatggaaacctcgacacagttgagacagttgttatgacttgtaacacccctattttacaattagaccataaagcccaagtccagctcgctaatgttttgaacctaagtgaaaacctaatgatcccacgagattataaaaatgaaacgcaagttgcgagtcacaccacaaaaaccctacgccgtcaaacacggtaagtctcgatctcaactcaagtctttgttcttttgtcatgtttaagtgctcagcctaactcaaacccttgttgtgaaccgacgcatcacaactcagaccaccggtgatcgttgttgtgttgagccggagccaccgcatgaatcaccggagaggtaacacacgtgaatcaattcggttttgatctcttagctttctttaggattgttgaataaatctaatcatggatttaaccatcacagatctgtgataacaagtcctccacttcgccgttcgttccgtcacgtgaaaccgaccagaaagcttgttgaggaaggtaactcatcaaaccttgtctcgtatctggttttgttgttgttatgtttgccttgattactaaaccatgatctaaaccagttaaaatcaatgaatcgtttgttgagttagaggttacgtgaaattgtgtcgtgaggaagaagaagatgacttggttcattggtttagttattaaagtgttggttaaatgctgctaaaccggaagcttttattcacgtgcatgcgtggattcaatttatggttgtagtgttacgtgtagtcgtacacgttcaatagttaattattagacttggttgggttaatttattatattatttttagttaatttattgaagtatagtcaaaccaattaatcaagagttataatttgggttggttatgaaattaataatagattatttttggaaattaatttttgaccggttatttaaaccgtcgcagattgagatcgctattggaccaatttccgttgttgctagtcctaaaccgtgttatccaaccgagttgctaaggcgaaggcgggatccgtggaaacagagtatcacctttctacttttgtacttttgaagttcatttgtataggattagacattgggtgttgattgttaattattaggaattaattgttaaaatattataaaatatgttgtgtgatgttatgcgttaggttgttagcgtgatatacatgttgatttgtttgacgtctttaagatgtagttttaaataaaaatatagaaataaataaagagaataatgatattaaagaaaggataagattgaggatgttggactgtaatggaaccgacgagttcattacaggttattaatcgctgacgagcaatgagaggaaggatcgagttacgagccgtggtcttccataaataggcttgaggagccataagttaacatatgttaaaaactaagaaaagaaaacaaaagatcttgcggtgagcaagacggaagctagtctgttatagcttacgaggaaagtttaagctatatgctttttgtttgagtctatgcttatgaaatggatattgtgtgaaagtataatcgtttattgtgattcggtggacagttttgactgccttcactgagtgattaattactcacccccttttcttttccctcaggtgaggaagagaatgttgagtagctgctcgcttggtgttatttcgggaactttggggtttcatttgatttatcgttatttcttatatttctaaacacggtttctttatacatttttatccaaagattttagtttatttatgctactattttaagacaatttatttttgattcttaataaaagaaagtttcccgaaataatgatatattatttcaagatttaatttgaagaagttgaataaatgaatggaaaagatgaaagtacgtcatctcaacattgagagagacgggtattataactggtatcagagcggaggtttaaagtcaagcatgtgttgacccggaagactaactatatctatatttatttttatgaaaaaaagttttcttgtattttatagttttagaaagcgttttaaaaagaaagagttttcagtattgaaatagggaaaggggtttaaaaaaaaaaaaaaaaaaacaccaaatgtgctagacttaattttaaagtagtagtgtaaattttcggttattataagggtcctaatgtttagtcttgtgtaaacagaaaatgccgccaagaagatcaggacgtcctgcgaacgctcgggtaaaccgagtagcgaatgcaccagttgttggacaagaccacccacctgtggtagctcaaccagctcaggcatttcaagcatatgaggcagctcatgcagctaatgcagctcatgcagcagagattgcagcgaatcagaccaagatgcaggaggtccaaaacatgatgcgtgagattttggatcgaccggtgtatgcaccgccaccgccaccggcatctcgagttgctgcacctcagtaccattagccaccgccactgccaccagcacctagggttgaagtacctcagtactatcagccaccagtgccgcttgcacagaccaaatattttgggacgatgatgctcatgagtaccatgggcacaaagtatttcagtggtggatttgatcaggttcgcgctgatgattggaggcagatgttggagaaaaatttcaggacagcgaggtgcccgaaggaatttaagaaggatttttcagtgcattacctgaggggagaagcagatcattggtggaaaatttttgagaggggcttgcctgctggatatgtgcctacctggaaggatttcttaagggagttcaataataagtactttccgcgggaagctatggaacagttagatcatgagttcatggagcttcgtcagggcacgaggaccgttcgtgagtatgatgaggagttcagctgtctaaggatgttcactatgaagaattttggagagcaggatatgattcaaagattcatgaggggactaagggctgatattcgtactcgtacctccattcgagggtgcactagcctggttgagttagttgaggaggttgctaggttggagatagaacttgtggaggaagctatggctctcaagagggctcaagcaaatgtaacaaaaggagctgaatctcagaagcgcacttgggataatcgtggagcagtaccagtccaaaattgtcaacattaagccacatgtggtaagaggcacagcggagcttgttggagtaagagtgggaattgcttcagttgtggacaagctggtcatgtatggtcgaattgtccaggaaaagacaataattgtaggaggtgtggaaagccaggtcattttgcaagggaatgtaaagtgaatttgactgggggacaaccaggaaatcagaacagaggggttatgccaccaccgcaaaagaggcaagcagtgggacctcgagtgtatgccatagcaggcgaggaggatgttaatgaggatggcgcagacccgattgttggtaagtcttcttaaaaatttattaagtgattttctttccatttctggatgaggactgcttgtgcttgttttgctgttcttgtcttgcttagtttaagaacctgtgtaggatcggttcttgttggaggagtcaaagcctacactatgtttgatagtggagctacacactgttttgtgagtcctgagttggccaagtgttgggattccagaattgagtattcggaaaagcggagaaaagttgaaaccacagggccaggattggtgaagtcatcacggacctatcgggatgtccctgtagagattgaaggtgtggagttgtttggaaatttcctagagatggagttgaaccgttatgagataatcctcgggatgggttggttgaagagacataatgctaatttggactgcccaaggttgcgggttaattttactcgagaagagggtaacttgatgtttcagggagtcgaaactcgtagcgggccgatcctttcgatgattcaagcagataatttacagtggactggccctgaagcttacttggcaacaatctcatgacgaaggagatacatgaacaaaattagaggatattcatatagcagcagagtactcagatgtttttaaaccgctccaaggaccgccaccaagtagaggagatgctttcaccattgagttagagccagggactgctccagtatctaaggcaccttaccggccagctccaacagaaatgactgaactgaagaagcaattagaggagcttacagacaaaggatttgtgaggccaagtagttcaccgttgggagcgcctgttctttttgtgaagaagaaagatggatattgtgtgaaagtataatcgtgtattgtgattcagtggacagttttgactgccatcactgagtaattaattactcatccccttttcttttccctcaggtgaggaagagaatgttgagtagctgctcgcttggtgttatttcgggaactttggggttttatttgatttttcgttattttttgtatttctaaacacggtttctttatacatttttatccaaagattttagtttatttatactactattttaagacaatttatttttgattcttaataaaagaaagtttcccgaaattatgatatattattgcaagatttaatttgaagaagttgaataaatgaatggaaaaagatgaaagtacgccgtctcaaggttgagagagacgggtattatatgactccattagcatctaacaataatagaacagtaactcagaatgaatcaaaattttagtactaaggaattacaattgcaagaaaccataaactatataaataaggtttatattaccgattacataatcctcagactcagcattgacttcatcagcatggatgaatggagagaacttatttcagctctatcacttacaagccacatttttccacataaactcgatttcataatgaaaatctgagtacttaggtattgttgttgctctcttcaatcgaaagtcagcaaggtaatacgactttccttcaaataggctaggcttgaaattgttcatataatcgccccaaggtactctagcatcgattctgtttccctgaataaaaagagaaccatataaaattctttgaacaataatagaaagtaaaaaccaaaataacaatccaaaaatatatcatagttactcaccttcacatcacagaggatcatggtagtaggagttggtttgatcatagacggattgtcccagatgcttaaaattttcacgtatagaacatgattgttcctgtgtaaatttagatcagggatataatttctctcggccattaaaagtttgaatggttcttcctcagatttgagagaaaagatagattgacggaagttaacctaatattggtcttatatatatatatatatattgaagaagcacgaggaaagttgaatagattcagtgaatatatatgaaaggtttcttgctatatattcgttcaaatcatttagtcaatatataattatgtgctaaccgattctgtagccaatcacaatatagaaagatctttttgctaatgattgctgatatgttaagtagataatgacaataaagtagttggattcagcaaggatataaataatggttgattatgtttaaattccaaaacaaatttttaaatatttaatcaaaccaatttagttaatatatactaacattgttgccttactaaaatttaaggaatttgaagtcggagaaaatagcacaatgcattaaggttagatgattcttctattactcttgtcattaaagttatcacgggttgtaatacatttcatgctaggtgttgttaaacaaaaggatacataagcaaactttactaaagtagtcacaggaaatccaacttacaacatatgaaaataaacatagttcataaaacatagcacaattgatttcttatacaaatcaatgagcatattataagggggtgagtaaagaatactcagtgaggagaatcaactctgcccactgaaacatagaacactttctaaagctatacaaccatcatcataacatataaacatagacacaagcaatcaacctaacatgttttaacttctaataacacattcataacaatcatcttatttatattaatataaacatacacatcgttaggtccagtcatcttcgtaggtggaggctggccctcgtggtggaggctggccctcgtggtggaggctggccctcgtggctcagacactcctattccaggctcctcagctgttcttgaccagatgttaacccgtcggtccatcactatccacatcactagggagaccacggcccatagctcgattctccctagtcatacattaatcatacatacatactcataatcatacttaacatacatatacttataatatcatacataacatcacattatcaaacatcatactcaacaatcataaattcatatcatcatgtaatctaatcctatacaatcagatctaagcctacatattatgcgtcaagaagcataacaaaagaaaatgatatcatgtttcgcaaataccaccctcaccttggcctattgaagatgacaacagaattctccttcttcctcatttagacaaacttactatctcaactgcgaccacatgctcttaagctctaacttagttctccttcaaccaagacctgaatccatgattaatgaaagctcctacaaagctttagctcaagtcaagctcaatttcccaataaaacaataaaaactcgtcatgatttactccatataaatctgtctcggaaacatacttataagtcaggaactaaccgttagaaacgtgatcccaccgttgaatatgtagatagtagtataatgattaactccacggagtttcatcccgatcggacttcattacaagctccaaacgttgtcgtcaacaagtcatcttgaactgtcgtttagggtttcctgaatttgacagactttgcagttacttgaccagaaagaaacactcataacttcttgaatataatctcgattctatctatgttagcggctatagattcttcacatcgtgttcattgaaaacacaccttaaactgcactttattctctctgattcaacgggaaactgattctcagaacctctacctgaaattacaatgtttctcagatattttagaaaaaactgcgctctgaaaactgtgactattcaccaactttaaacgcgatttcccgattgatcttacctctgattttggatcgaaaaactgttctgaaaacttgggaacgagatctatacagaaccgttaagaactcgcccaaactccatcaaaacgtgacaggaaacggatcaccaattccaccacttgaaccttttccttctttcacatattcacacaaaaacccaaaagctaacttgatctatccaatcaagccgttgtttaacggtgatgatccatgacgttcgctttcactccacacttgtacgtgatcaaaaacaaaaccacatgctccaacaactccaatctcaacgtcaatggtgatggtggcttgggatcaagttgatttgatgttcttaggttaataatgagttgctggagatgatgacgtgagaaggctgcgggaagatgacgacataagcatatatacatacacatgtaacaaaacccttattattttgtgacttgcttcacttgggcttcaatgggctctatggacttttgtttttaacaaaacaaatagggtgggttcaagttattgggtttggggtgttacaattctcccccacttaaatgaaattcatcctcaaatttttgacggtgatttatttccatataaaatcacttacttgtagctctagcaaacaccacatctacatttacggtatactagcataagacccttcattaaaactttcagtttaccgttttttaaaaaatcaacacttgttttctaacgacgtgtatccttccgttgcactactttgatgactgcttaaaagaacatataacttgtccatctccaccgaattctagcgcacaagcactgatcactattagagcccaaagtagaagaattgcgaacaaaacaactacttaggcaaacaaggcctccaagctaactatcattcaacatgttcgtacaggctcacatgtgctgaggcacttgaccttggtttccttcccattcctttttttttaatagtttctagggctccttccccatcattgataagttaacatctttacatgtctatgacttagacagtttccatccgtcttaccttaaatgtctctaagctcttattctctgataatactttcttccatttctgttctcggcaaacttaccctttagcctttcatggctaccatgatccttccttgtcacttcttaacgccatactaaagcaaagagaacatgagaatccaaattacatttccagtatcacaagaaatgtaattaagtcttcccaaaaagaaactaagcaaatatgaaaattcacttaatcaaataatactttaattcaatcaaggcaatcaatcatagatcaagcaaaacatataatcaatcactcaatttttttttttataaaatctttttcataaaatgattttttaaaaaacattgaccctccgggtcggaaccggaatggccttaactggctctgataccaaaaacatactcatcatctgtatatacttgagattggaatctacactctccatgaaaatgtcatcatcctcatcatctgatcctgcaaagttactcctacaaaacagataccaaaaacatacaaagttaatgtctatatatacttgttatggaatttacgatacagggaataaggctgtagattacagatagttgttcttgtcgattcctcaaaattttggatcaatgtgcacctttgaataaccataaacatttatcaagcatggttttcctgttaaccattcacaagaaattgaaaatcataaatatcatgatctcgagataattcagactaataagtaataagaaacgcaccttcaaactccgaaattttccgaaaacgcagaataatcatcacatgctccatcttaaaattaggttctcttattttcttgtaccattttctttcaaactcttcacaagaacttcttacagcaacacatttgatgtacttatgcctataatatgaagtgtactcaaaaaatattcgaaaagtcctaactatctatcttaataatatagaaagtaaaaaaacttccagagaatctttcatagtgaaaaccaggtatcttgttgcaaagtcactctccccctctctagcaacccaaggtatcttcccgatgggagatactgattcaattactcccattgcatctgtaaattgataataacaaaggttcaagtttaaattttatgatcttcagccaaattatataattcactgtacggaaaataactactaaaaaactcaccaacaacaagtttcttttggataggagctgcgtgtttgatagtatggaaatcaacacactcaatgaaatggtatctactcttaggcgcaacatgttccattgtagtctttttcaaaaactcaatttggaacacatgagaagagaatctttcaagtgggttagctacaaccactttgaagtttgagagtatatatcattttccatctgttaatgtataaatcaattcttcattgtatgcatgtcttgaagacttaacatcgattcgatgtccctgagatcatatataaaatatcagtgaatctatatagagtgttcaaaatgataagcattgtcttttttaaatatatagagtataaaatctgggtaaagatattgcatggatataaaaaaaccaaaagatctggtaaataacaactaatctcgaaataaaaactgcaaaacaattttcataccttctcatcaactaaaatcatagtaggttctttcctgaagtaattaggaggccaattccacaacctcagtagcttaacaaatacagaacatttgtttttttaggacgcaagtcagagaaggtcttgaagtttgacatttccagaatttctctaacacttcaaagtgttttgtctttacaggaaaatgaatgagataaggagagagtctattgatctttccaataaacgtaagttcttattttttcgaaataaattatatcacaaatgaattttcagatttcagccaatgaatgattactctttttgaatttagacagattcttttgaggatttcaagatccattgatcttttagatatttgaaaatacagattaatcacaatatttcttatacatcacatcttactttatattatatataatatagatgcaagtagaatgaggataaaacaacacatataattctctattttcatatgttttagtttaaccttgaaaccgattgtcaacaattgttaaggaaatgaagtttgtataagagtataaatatatagtagtaacaccaaaacgaaagtaagtacctatggaacatgttgaaatatatagtagtaacaccaaaacgaaagtaagtcaataaaataacaattgaaaatgttcttaatacttattgaaaaacataaactaagtcagaaattctgacttttattaaatgcaaaacaaactaaagactgtgaaaacagaatactcaaattttatttcttgtatctttgtgtcttcactttggttaatcctttagcttttgaggcttgaggctcaatctcttcaactactcctgctttcagtagacttccagcgtcatccttacattggttccaatctcatcggcatcttctattatcacattggttccaatctcatcatctccattttctgagttaactctagagcataacttcttagtagtactcgattgatcaactatatgagacaactcagctgaaccacgcttagatgaaggagtacatagttcattgtttgtagcatcagaacagttctcgctgctattagttaacatcaattgaccctaacgcacaaaatcgagaaatataataagttaagagtacaaaacacttaataagaaaaacaaattgtattaagttgtttaatcatacctgttcctcagacccaattgttagtggatcattatgagtgtcttcaagcaaacctgattcttctttggttatgtctgttccaagatgcacctttgtaactttgtaaatatccttaccaccataaatattgactttctcaacacttaccagaaaatggaatgtctttccacaaaaattagtgatgacatcaggtatgatggtaggatcttcaatctatatacatgtctcacattagtactctacattcaaaaacatagacatatatctattaatggaatgacagtatataaaataatacctcctcgtattgtccatctaataactcttcagaagtttttccaatgagattggttgcattattttcaaacaccatgagtttaatttaagctgtctggtccattacacgaacatgaagcttgtacctggagtagagtgtattatacatataaaaataattcacacttataaacatgtttactttatgtaaggacttctaggagacataattattttctatcttttacaaaataaaagagtaattcttaccttacctcaacatttctgatgctctcataacatttgtcacaccagaacttaggtttcgtaggtgcttggatcctcttaatggtactagttgattctttcaccaactcagtttttctgttacatttaggacatccaaaatagaaccatccccaatcggtatcaatggcaaaaatggaaccaagtattctccattgcccaacctgattttcaatacaataacaattataggtacctaaactaaacacagtaatttaggatttatttcaaatatacttactgatataggtcaaattaatcctaagaccactctctcaaataaagaggtcagttgcagcacttagagatcaaattcacaaagctctctgatcacgcaatagactaatggcaaatcgaattatgctaagtaaaatagtaaataaaataaagagaaacaaaagtaaacaatagcaatcgattggattgttgtgaaacaagataataaaagcgtcaggcttagggtattctcaaaaaatagatgatagtagatctagaaatagctaagttgttattgaacagttctcgaactcaagttatgattttagagtaaccggtggcgttccgcgaaactccctatgcctatagctaagaataacaggagaagccgagagatctttaacttaaacatgcattattatcaagtctgattagttcacctagtatctaaaccagatcccttctatgagcctacctgttctttcttaaatgcctaggctcatctatgatagatcaaatagcaagtacctatggtgggcagacttattatctaatatcaagttccagttaggtactctagaactagtattaagaacaatcaagatgaagaatcatacagataacataacaagggacaatctactaaatcatctaaatccctaatgagaaaccctaaacctaacaagtgaattactcagacatgatcaaagaaacacaaatcatattctgaataagaaatcaatgatgaaaataacaagaggaaagagtaagaaagatccaaaagggagtttccacagggttttgctgccaaagtacaaaagagatccagggaatagcctcccaaagctt

SEQ ID NO: 1477 - DNA, 105589 bp, Arabidopsis thaliana
gaattcaagcaatgcaacaacggggcttcccctagctggtagtaacgcattgtttaaagactccgcaatattactagacatcaaattatatctctctcccgtaaaatgaaccctactccaattcgcaacacccattccttcaatgtaattccaacaggacatactcctttttttttatcctgtcacgaacaatattaaaatcttagagacaaaatgcgtcacctgcttgccacactagagctgggaggccactcttctttccataccttcctttgacattccttctgatgtggaccaaacaagctccatggtgtgcttgagggaacacaagaccgacggatttgaatattgattgattccggtctgagacaaatgtcaagtcagggccatcttttattatttctgagagtttattcatgaaccatgtccaagaatgatctgtctctcgctgtccactacggcaaaggcgattggaaaaatctgaaagtttgcatcctggcaactcgcagtaagaagacaaccaagatacttaccaaaaaggtgtgtaccatcaacgacaacaaccctccgaatatatttcaatccctttacactagcccccaatgacaggaaaacatacttgaatcggtcatccccaatatcatccaactctgtttccaaatgataaactgtgcaagggtttgctagttgtaagacatgaagataaaccggcaataaagagaaagagctctcattagtgccttaagctgtctcaacagccaattctttggctttccaacatttccagtacgtcatccgaacattgtgatccctcagaattgagtcgggtaaatctcttgctcttggaccacagaaggccttggcatacttagctcttaggagagcagctacaaccttggacgtagcatgttttgaaaagcggctcctagtctgaaccttacacacatgttccaactttgccagcctcacttcatattcttcgctttcgcctccaacttggtgtgctctaactctccaatcacagtttttttgtcataacattcagcaaccaagtaatgtttctcatacctagtaaatttgaagcggaaaatacggttaatggcataaatggacaaggcaatcctgaaatcttccctcgatgcaaaggtccttccaacaaacatattgtcatcctcttttgtcaaatcaacgtaagctgcttttgcttcaatatcatcgttcccaaacatcggctcgagatcttcgtacccatacacttgatcaatgcttatacctttctgacaagtttctaaaagatctgtcatagcaccagggttggtattttgaagccaaactttctttttggggggctgctcaacgaaatcatcatccccgatgtctttgtgtacaacaatctctttatcagattggaggatgttttcgtggagggtatcgtcgtcgaactcagaaacttctgagtcacttcctgtactaagagaggaagattcgtcagattctgctaaagactctgaatcatcacctgaatcaggtacttctgccggtagggatgtatccacccctgcagcggtgacaaaagctccagacttctccactgcttctagggcttctaacagaagttcatcgcttatgtcccattgactggatgaatcacaaacggctgtactctgaacaaaagcagagtgattgttgggaggctgggcatccatattatcttgaacagtagataataaccccgcaaagtaacctcctccaactgccggaacaggtttatctatagactgtacaatgcctgcaaacgttggttctccagcttcaaaatacttaacaacacttgcgctagtctgtccaggttcgcaggcaggaccgacgataactgaatcgccttctctaaaacacacaaacagattcacagatttatcaccaatacttagagatttaaagcatctaaactgccaatcatacccaatcattgtcggacccggctgaacaccagataacagagctagtctgtcctcgaaatgtagctaagctccaaagatatggaaggtttctccagcccaaagatgtgacgaaccttaagctctaaatcccttaaagttattaaccccatcaagctcatcgccctaccgtgaccacaagaatcaagcttgaattcccattcaccggtgctatacaaaatccatctaccaacctgtacaacgacaatatcatccactgcaaaaaaggaattcactttttatcagactgaaggcttttaaacattattaggagaaatttacaaaaccattttctgattagaattccaccttccataggagaaacgcaaagatgaattttccaggtagcaaagaaacacaaccgaaactgataatcatcatctctttttgttacttaaacataatctaatcctctaaaaaaacgagctcaaattcccccaaaaaatttagctactttcgagaaaaacctaaagagaatttgattattataacattttattcaccaacctgttaactaattccgttgatttgaaacattcataaatgcagacgtttctctcagctcccactccggaactgaataagccgacgatgaagaagttaacttcaacgccttcgccatgaattataaaactgttaacagactttgtttaaggcccatctagaaatacgctaggcccatgacgtttgctgtatattgtaaagcaaaacccccaactcaatcagaaggtttcctgccaacgaccaaaacaagcggcggcccctaaacgtaattttctcaaacgaatcatggcccatgtttttctgtattacaggggacgcgtattacagtcgaaagtggacccggttatttccctaattataaatagtgagtgtactacttccataattatgtttcataaacgtactaaatttcaatttattcctatttctattcaatataagttattaatattttttaattttggatttaggccgagagagatggtgtgtatccggatcatctaacgttgatggaagatacacaccaacaaaaaaaccaaacaaattcaagatccggttgcaaaggaagttgtagagaattcaaagaagaggaagcaagaatatctccttacccaaccatctatagatggtgtcgagaatagtgtagtcccaatggagattgtcaacaaattcgtttttgaggtacttatgttttttaatttttttaattactatctcataatagattaaagaatatttgattggtatgttgagattttgttgccatatagatctatgttgcgtctctcctctactattttatataatttgtttttgatacatactattatatcttctttgcttgtaggaaactccaaaaagaaagggtcagatatttgggttaggaaaactaggtgtagctcgatataagtctcattccacatcgtcgtattcatgtgatcccatgcttgaggcgtctctcaaagagaaagaagcacggattgaagctttggagactcaaatggccgaagagaaagctgagaacaagcgccgaaccgatgagatggcaaaggagatagccgaaaacaagaaaagttccgagacgatgatgcgtttcatggaagatatgcgaatgcggtttcccaattctagttcttagttcttcttttaaattttagtgtgaatactttattttggatacaatgttattgtaatatgaatggtttttccatttagttattttattttgaatcattttaaaatttaattatttttagtttgcataatttataatttctttttgttaaatcaattataaatcaattgttttcgtcaggcattttccatcatcgtcggtaatccctcagtaataacggcacaaaaatgcatcggcaacttacatgttcgtcgtcggtaacaaccatcagtcatatctcggttaaccgtcagtcttaaaccaaacggaataccaacgaatatattattgacgatgttgattcgttgaaagttcgtcgagaatataaccgtcggttcgtcgtcggtaacaaccatcagccatgtctcggttaaccgtcagtcttaaaccaaacggaataccgacgaatatattactgacgatattaattcgttgaaagttcgtcgggaatataaccgtcggtaatccgtcgagctccccgaaaaaataccgatggaatttgtattaccgatgctctagaaccgacgaccatattttatctgtaaatcgtcggttaaggccttaactgacggattatcaacggttttgtttgtcggttacacgatgttttcttgtaattaccaccacctgtactaatccttctttgactttaaccctctttcaggcgagtaatgaactcaatgaaactcaatgatatgattgagcattatgaagggttgctacttagtagggaaaacgaaacaagggcctggagagatctcttccctcgaagctgatcaccacgccctttcgaattctctaaaagggaaacacgagatggaagatcaggttgccacttcaaatatgagctcaataagtcagatgatgagctacaggcgcaatacaacaagtatgacaacttcgaaagagaactgtcgagagttcaagacagacttcttcaatccgagtaggccgctaacatctcgcacaatcaactcaccgaactcaacctaaagtatcacgcattggtcaagctaagggactccaaattggcaaagtcagcatcgagggccagaaaagaagttaaaagtcatggaatggaattgattcagggtgccatccgtttcattcagatggaaaaagcccgaactgaccttgaatctgatatcaaggaatacgagcgcaacctgctgttattggaccagacttatgaggatgacttctccgaggaagaagagagattcaaactagagcccaatctgaaagacaaaaaagaacgtcttgcggcacttcccacgtcttctttttatcccagcacttcgcggaattcttcaaagcttatcacatatctgccttgtgattgatttgactacttttcttaggttcaagcgatttggctgaacctgtttagcccgaggtgcctgacactccggcaccgatccttgaacctagcgctgctcaaggcgaagtgcctctagttgcgaacgatgagcaggtaatgactctgaatgatggccacaccatcaaaactgggccggaactctgttctgaacaagatcctaccaaggactcatcctacgttgcgctagccgtggctgccaacccatagtaaccgtgtctacttcaaaattgaggtgtgtcccaaaaaatttgaaaacttaaatttcgagcaagttcacttcgcctatggaggcttattattttttttattttttttgaacaagttgtttgcttgaggaaggctttaaacctttcaaattttcgatccctaaaaggtttttttatttaaacaatgaaatgcgggttggcggagtctgcattcttagatttcgaccttgtggttatactttgagaaaattggatgatctggcctttcctgtaaaatgcgataactttgctcggcttaacgcgagttcccactttgagtttagtcaactcgataattttaggggcttgggcccaacttgtttcgttggccattaataggctttatctttaatgcgacggcttacttttgtaccttgagaaattgaaaagattgcacgtccttagggcaataattgaacttcctcgatttccaaaaatggtttaaaccattcggccacgccgccattattaattttctagttccaaggtaaccctaaatttcctataaataaagtccttattgtgttcataattccttccaacaatgatctcagaaatttatctccttgatacgtcgaagatggacaataaaattgcgacccccgtttgtcccgtggatcccggcagccctctttacgttctggtgatggttttgagccatccggagtcctatctcctcatgctgccttccactttccgccaaaagataagaaagaggcgtatggtttcatcgaaaaggtaatcgcattaaaccctactgctcctcttagaatctttcgacccttattcgtttctcttggagtaaggttgttgaaaagcatcgtcatgtatgcgaggagagggagcgtgtggagcttaaaaggcaaacgctagaagccgcatcgcccgagtggaaaggaaagtgagggccttggagagcaatcactttcagtgggaatggaggaactttgattccgttgctaagaacgcgaccatgctccagacgtttcttcgtagtcaaggtaaagttcacggacccgtggctcgtacaaccaaagtgctcccctccggtagcgaagaggatgaagatgaagaggataacaaccctttgaaacgagtcaagacggaatccaaggtggatgaaaagaacgaggcatccacttcgattactgaaccgacgatgaaggaccatattcctgacctctcccaaaaatgtccttgaactatgtttatttatggaaacttttaatatttccttgaaacgatagattttgggaaatgtgtttaaatgaaggatcagtcggacgacgtgaatttctctgccaatcactctttttggaataatggacggatttcaggggataatatgttctataaattatgccttaaccttgttccattccccattccaaggccgttgaactggtctgtattctaagtcctttagcgtataaacaccattgcggaccactttggtaacgatatagggtccttcccaattaactctgagcttgcccgccccttcttcccttgtattgtcgaagactcgtttcaagacataatctcctacaaagaaaggtctactttcaatcttggtattgtaatatcgggctgccgcttgctgataattatggattcgtatcaaagcttaatcctgccgttgattgatggtatctagcgaatcgtcgagcattaatgagttttctgcttcgtttaaaggtgtttcggtttggcagaatcggggaacgttgagtttggccggaaccactgcctccatcccgtataccaaagaaaatggtgttttccaggtggaccacctaagagtcgtacggtaagcccactaaatgggttgaagctcatcataccatcctccctttagatgacttaggcgtttttgagattgctcaaaatagtcttgtttgcagcttcggcttggccatttccttgcggatacggcggggtggagtaactaactttgataccccaatccaaacaaatagcttcaaactcaagcgaattgaactgtggtccgttatcagtaactatctcgtacaggacaccatgccgacatataatattcttccaaatgaaatttttcaccgttgaatccttgatattgagatatgctccagcttcaatccagtttgagaagtaatccgtcaaaattaagagatattgtacgccttaggttgacttatgcaatggtccaatgatatccattgaccacctcatgaacggatacgaggcagagatagaagagaacaactccgaaggttgatggactaaagtgcatgaagatgacaacgcttacacctttgggaaaacttaacataatctgtaatcatagtatgccaataatatcccagtctctgtatcttgaaagtcatagcccttcccgacaaatgacttcgacacagcccttcattcacttcgctcaagacaattttgacttcggatccagaaatgcatagaaggtaagggtcactgacacctcgcgtgtacaatgcacttttggctagacaaaatgttgcgctaatgattctcatttttcttgcttgccacttgtttttcgggagttcgcctgttaagatgtaatgcttaattggctccctccaatccttagcgtaattttgatttgttttgtgaaatatccgcggttcaggttcaggatgttcgttgggctcgagaattacttcttcacctgagacgacaagctcttcaagtaagttactagttgttttgccgggtattattttgctctaagtttatcctgaatccttttggattcatacgtgtttgacttctttgattttcttttcttgataggtggcaattccacttcaggttcagctcgggcatgttcttccccacaagacctcgtgacaataagttttttttttctttgatgctcctctccgtgatacattccaccgggatgatcctcttcaactaagaatccgatgttaacgccaatgcggcaaccgtatctacagttgtattctctcctctaggtattcagactaactcgaatttttaaatttttttgaataaatccttgaccacttcaagatgtacttccatcattgaatctttggcttcatagtctccattgaaatggttaactactagttgcgagtcacaataaatgattacttcctcagctctgattctttgtgccaatcaaaacccgacgatcacggcctcatactctgcttcattatttgaggcagtgaatagtaggcggaatgactgttcgaggatttccaaagtaggtgattccaacttaattcctattctggatccttgttttgacgaagattcgtccacatgtaacttccaagtttgattctccggttgctccggtgcattgagcattggtaacttagtcaaaaatcagctaatacttgtgccttcatacttacccggcttttgaactctatatcgtactcacagagctctacggcccacttcgccaatcttcctgactggtatggactgtgcagtatcgttcgcaatggctggttagtgaatacttcaattgggtgagattggaaatacggacataactttcgcgctgaagtaaccaccgctagtgcaagtttttccatcattgtatactgagtttttggatctgtcatcgatttgcttatgtagtaaattggcttttgctctccacgatcttctcgaactaagactccgcttaccgcatgatttgatactgacacatacaaatatagcttttcatccacttcgggctttgatagtacatgaggggtagtcaagtatgctttaagttgtccaaatgcttcttcacatctttcatcccccgaagggactccgaaggtgcacttcgccggattcagcttcatttggtaccgattaagaatttcaaaacactcttttaaatgttgaatgtgatcctctttcttcaatgatttcaccaacatatcatctatgtaaacttccatcgtttttccgaggtggtcataaaacatcatattcaccagttgtgtataagtcgttcctacatttttaatccgaaaggcattacgttgtaacaataaatacctctattcgtggtaaatgaagttttttcttgatcatcgggattcaccattatttgattataacccgagaaggcgtccatgaatgttagtagctcgttccccgcagtggattccacaagtctatctatgtgaggaagtgggaaagtgtcctttgggcatgccttgttaagattcgtaaagtcgattcacaccctatcttttccattctttttcttcactacgaccatgttggccacccattccggatattgcacttcctttatggatccaatctttaatagtttatccacttagtcatttactgcctttgtacgctctggtccgggcttccttcgcttttgttttaccggcttgaaactaggatctacattcaactcgtggcaaattatactcggatctatcccgggcatatcctccgctgatcacgcaaatgaggttttgtttttcttcaaaagtagcaacaaagcttcttttagttcgtcagtcaatgttgctccaattcaaactctcttgtcgggttgatcttcgtccagtgtcacttcaaccatgacatcatctactttttgtctgcttggaaacctaggaacaattcccttctttgcaggcttcgttaattgctattgaaccttcatccgatggcaagttaaataacatattcgtgacgcttccagaacaattcccttcttcgcaggataatgtgtaggttgatggcctattgaacacaacaaaatcgacgatctttgaaactttcccagctagaactggtaaccttattgtcccgagagacatgactcactcgcttgtatatgctactaaaggagatgggtgccaaatcacttcggtccaactaattctcattctttccaatgtgcttagaaaaattaagtctaccgagctacccgtgtcaatgagaatttttgacacttcgaagttggcgacatctagggtaatgactaaggcgacatcatgcggtctttcgaggtgacaagtttcttcttcttccaacgagattgaggcaccttgaaaatagacttcctcgcttcagcttgttttaagtagaacatttcgcctatgctttttgatagcactaactgaagtattagatcttcttcgaatctcgaatcatgccacaatccttttcgaagagccgataacgcggattagtgtgacacccttggaagttttgagagcactcctttaaactttgtaatgaaactacgaagtgacttgtttggtccttgcgacaggtttcatatatcggtgtccgaagtgcttttatccataaggatggaatattcctttaaaaacacggctgacagctcgttaaaattaccaatagatcctggttccagctgtgtgaaccacatcagcgcctgtccgcaaaggttttcagagaaaaccttgtagtaccatgcatcttcatcgacttcttctagatcgatttgcagtatcctccggcagaatttgtttattaacagaatcggggtttgtttgtccactggtaccgttcatcgtgtgggagccaggcgaactaaacatgcttcttcgaactcctagagggtttcctacacccaaagaccgaatacaagattgtatagtactaacgttctggctaagagatacctggtttttttgtagtgtgtcaacaactttctccacatcttagaactttttcgttatgtctgacatgctttgctgcatgattttgagtattttggcccagtgatgcactgatgacactttcttcggccattgctgcttgtctcgaaaatgtggtgaaaaaaaatcttactactcaagaatcctctgtcccaacagacggcgccaaaatatgaatgtcggattcacacaaagtatatatttatttgtgagaaggattattcttgaggacaaaaatcaaatgtaaaagctgtaagtttatattcaaatgtctatagtaagattgctagaaattgcatgtcccttacatggctcaaggcctctcttacttatactaaagcatggtatctaatcttaattgtacaccataattctccttttaatgcttccgttacgatcttcaagttttaatgcctcaatgttcgaatttgaattgactttgatcttcgtgggcttcgctgtccggcccaacatctccaagtcgaactgtccttaattcggccttatcgccatctcgtagtatagacacctcgctacatcttttccttcacttcggggttcttttgggccatacctcttgtggcaatctttgggttgtccggactttaggttcaggatctgacaccaacatatattcctttgatcaaacttcaccttctcagtttttgattcacctcaccttgtcttactatgcttccttttccctttataatgatcttgaaaatttactccatcttttttcttgaactccatcattactcaccatatatattgatttttgatcatcacctatgtctcttaaattgttcctcccccgatactcaatcttttcttcacccacttctttgttgtgctccttactctccagttaagtgaactccaataactctccttccaatcacttgcttcttctcggcttcttcacttccctcatgccttactccaattaataggtgtttctcttcattcttccaaatgatctcattgatcttttgttttcttccttcttcagaaataatctttacaccttcggctcttgccctccataactcgcatctcatcactctctttttccaaaaatctcctcaacttttttctcactattccttagttttctccgaaacaactcacccacttccccacttgccctcacttgtgttacaagccctcgttactaagctcggctaagattcttcaaaacattaaaatcttggttgcagtcccccatggtgataacatcgtatttctccaacttttactatttttttattgggttttccatggagaaatcaatagttacaggacacttcaaggcatacttcgagtatttgggcttcaaggaagaattatgagttttcatgctaaaaggagtagaaatcgacaaaattccgtttcagaacagtttttgtgcctcagatgtttggcatccgtttaaggtctttacgatcttggcatggaggtatctcggtgtcataggaaagctagaagagtcaatatttacatcgaagtcgaatcaaagcaatccatgaagccgttcagaagttatggcacgaagagtgaagacatgttctagaatcgtggttttagaaatgatcaatttaaaattgtcggccgaagagacttgaaccctgacgtcccctcaagtattccatcgaccactacggcgcacaaccactccttcccttcctcttgccgccaacttcaaccctccctaagaagcccaggaacttggcccatcacttactaattaatggaaagacgtttctaccctttgacctaatgaagccctataaatacaaggataaggggaaaccctaatcagaacccacaaaattaggctgcctcatgcgcctctcatcgcctccaagtcgtcctcctcttgttattcatttgttttctcttttctcttctattctttattctctacttgtaaaaggaagaagattcatcaagctttggatttccagaaaagatctctaaacccatttcatactcattttctttttatgcaatttcttcttcatatgatgttgtgttctttgaatatgtgtgaatagatctctagttaggttttaggggtttcgaagggttttcatggggactttagatcaagtttaagttggcagtttttatggttttatttgatcgtttacactattatttctatttgaatttaatcttcatgcatgtatgtccggaacgccacctagtacatgatcttaggtagtttatacttggaagaatcttgtataattgctttaactaactcaactgaataaagaactataaccgttgcacgcccgccgagtgatagggacttatggactagaatcgaacttgaacttaatgttttgatcttgtatctcgaaaccatgttatcacctactagccgttagggaaactgagtacgcaaggtattagtggtattagtgagaatagccggcttccacatactaaccgttagtgagtttcctatgtccgagaatttggaagtaaacaaacctaaccatgttatcatctagattgggatttatacctttatgttaaactatgatgcccgaagaaaaccccgaagacctagcgttttgttttactagttttacatcactcttcttattgacatttacttttattgcctttttatagttaacttccattgctttcttatttccattgaattctttacttattttcactgcattcacaaaacctccactgtttcgtttgtcttgatctaggttacctaacttgaattcttccttgtagctacactccctgtggattcgatccttaaatactactctgatatactttgcactcgcatgagtcgtgtggtctttcaggtaaaagcctggggcgaaagaaaacctgcatcaagctttttggcaccgttgctggggagtgattcaagataccgttgcaggggctaacctcctgtcaagacactttaagctcaaggcttattctctttctttcttactctactttgataacttcttgttccccttctagctttggtttttgacatctgcaggtgcatgacaaagagcaaaaactccggtgtaccgccatatcaagacataggtcaactggaacacaaaatccgaagacttcaaagacaacaatcatggccgaacaaaggaaccgagattaaggtctccctgcgtatcagccgcaacaagttccggccttaggtgagcacggacaacccttacacgatgatgatggcaaccccatctacgaggcggccgaagaacatgtcgatccacaagaccgagagtatcttgaagctcaccctctatgcgtcggagaaaacataaatgttcctcttccatgacctcccaattttcctaggcaaccgacatatattccaccaataagactggccgctcctcaacgtacgatagtcaattacgacgcacctaaccggtaccctcaggattgagctgccatacgagtacctagtctaaggcaagattttgagatcaaacctcaaatcattggccttgtgaagcaaaacaaattccatggtttgaacatagagcacccgatggatcatatcaacctcttcgaagaaatctacagtactacacaatcccatgggatacgtaaagactattttaagtgtaagctttttcctttctcgttggccgacaaggacattagatggttaaagtctttatctccacggtcgattactttgtgggaaggatgtaagttagccttcctaaatcacttctatatgaagtccagatccaagtctttaaggaacaagctgcaaggattctaacaaagaccggtcgaatccttctatgaagcatgaaaatgatttaaggactacgaacacgattgtcctcatcatggtttcctcgaaggtaacgttataagtaccttttatagtggactgcataccaagttccaactctttcttgatacggctagcaatggcgacttcacaaccaagaatgttgacgatgcacatgcctatatagagaatttggcgaccagcaacagaaatgcttccactgattttgatagaaccatccatactaaagactctgactcaaacaagatgttcgaactgaagaacacgatggcccaacttctgaagaatcaaaaccgtgccctaaacgcatgcgagacggtcggtaaaacggaagttttccaagggtacaatgacacatttgatcaagaagaagaagtgaactatgttggagcccaaggattctaccagaattgcagttacaaaaataacttcaacaacaactttagaggtaactctaatctctcttataggaacccaaatgttgagaaccctcaagatcaaaactaccaaccggtgaaacctttccaagggcgatttcaaaacgccaactacaacaccaatatcttccagccaagcgcccttcagactggacccaccgaacccgcaccatctaacgaaactaagcatgagatgatgatacaagacatgacgaacgagaatcgaaaggcaagtcaagctatgaaagtgcggatggggaacatgtactttgattaaatggaaagtttgaacgttttaccacgcatatgaagaagctcgagactcaaatagtgcagaactctgagtcggtcaaaaggcaacctaacacactcccagaaaggactaaagagaaccttaagggaatttgtaacacggtggcatccgcccaaacctctgtcgatgaagccaagtcctgagttccacccgtcaaacccgaccaggacgtcgcctgcaaaccataagaggatgtcaaggtcaagcccgaatgctaaccattacggaggcttaccaaggctgaagacctgggacgttttgtctgctcttgctcaataataggtattgaatttcttgactctctttgtgattttgttactaatgtgaacttaatgtcaggaagtgtagaggagaagaacggattgcgagatttatctccatccaaccttagtctagtcttcggagatgcatcccagcccgacagattagtttgcgaccctcggctggtggtaggggattgtttagtcccgaccgactttcacgttttagagatggatgaggagattgataagccgttaatcttgggatgaccctttcttgcaaccgtcggtgccgtgattgaccacaactgcaagaaaatcatattcaccaaggttaacaagaaagtcatctacccgatgatctccaagacggttccagcctccctgagtcctctgccttatgatcctgttggtcccgatatcagcaaggaagagaaaggcaaccgtgtaatctgcaagaatgccccaaaactgccgtcctaaccgcccgacctgcctaaaatctcaaaggtgaagatgagcgttcctccgaagcttggtaagaaaagcaaggaacacatccaagagatgataaagcgcattgaagaagttttcctacaagataaggtttctaaaaccccatatagaaggaaacttaccatagaagcaagggcagggtatcaagacatcaaggacgccaaggagaagcgatccctgaagctcctccccattgaacctaactggttcccaaacgtcgaaccaacgacgttaaccaagtgcgttcagtaggaggcaacccactaggtaaatactttccttaagatttaaattttgcttttgcttttgatcttattagtatttgtttcagttttatataaaacacaccaaaaaaaagagaaaaatagaaacagaagaagccaaaaaaaagagaaggaagaaggtcacatagacctgtcacttggcatcgtgacaaccggcctggctactcatccgagtaaccagtgtcacctgaaaaagccgacccgaccgtgtcaatctttggtcggagtccgcccgactgtgccaccctttggccagaggtgcctcacctagccgcccggaacaagattgtcggcctgggcaagaaactgcccgccgatccgggcgacccaaaactcggccaactatgtctagcccatgaatggataggggaagttgcaccgccatggccgataggccagccattggattcgtttgacctgcgaaccattccgcccatctcaaagacaatcgacaccatccaacacctgaccgcttatatatccacccactccaccctttcggccaagcaccgcaactgcatcgccatccattcacacaatccgttaccataaatttgatcttattcgttgccataatgacaaaaacaagataaactctatcttaggtatgttttatttattttgttttgttaaagctattggtggttttaggtttttgtttcaaggaatatgtgaatggagattaatatcatggaattcgactatactaagccgagtaagttcgatgttaagcaaggcgagagatcatccggttagtcaccacaacaaggtgacattgttcttaacctatctttctcacgaatcatccctatgcttattttcacaccggggacagtgtgaagtaagtctgggtggttaatgaatcttttactgctaatgctactctctattttgttacttgaaacctttttctactttttacacggatacgaatacgtgatatgtctataatttgcatgttttcagtgttcattcattatcattttgagtctagtttcatatcattcatcactgttttatatcatttcttatcattcttgcatactttgcatgattaggatagctttgcctatatattgcatttttgagtttttttcaggtgatttggagctgtttgcgagcaaattggaagaagcgagccagaaccaaaaggacatactcgacctcaggccgagtacatcgagcacaatacttgaccccctggtcgagtgactttggagccattctacccatctactcgaccctcaggtcgagtaaccgcagctcaggccactcgatgacattactcgaccccctggtcgagtatcactttgccacaccacctgataacactcggtcgttcactccaccacgttactcgaccccctggtcgagtatcatcactcaccatgaacaccatcactcgaccaagcacttgatcacatctttggagtctactcaaatttgcactcaaccagacaagatgaccacaaggaagagaagacgaagtatttggaagcggcctggagccccatcggatcacgaagcccatctcggcccattatcactctatgggccgggcgattaggttattggcccgtctactatctttttatttagttttgtataaatagatgtcttagggttctgtccgagaaatctagtcgactttgagtttttgtttcagttttattttctgttttactctggctgcgccgcttttgcttctgcaacctgtaattcgagacttttacaagttattcagattccgcatttaatttcacctgtcatgtactctttatctctttacttttgcaatattatcatttacctgcgtttatgtctttgagcatgttatctgagtagtgacatagagttcttaaggatgggatagagtagttgtggaatccatagtctgtagaatggttaagttttagaattgattgaatcccttcaggactacttgtgtttactgcttatttctttctgatcaactggaattcgatcccaagcattcccgcacccagaaggtgttcgatggaatgcttgatccactagttcctgaaatattcgtctctatcccaagggattgaccgtttagagcgtttattgactttatcagtctgttcttattgcctgcatagttagattctgttaatgggaattagtctgggctagctttgcttgaggatttctatcacgggagtgaattgatctgttgttgaacctgttgtttagggatagcttgattgcgcttgttaaccattcgaataggctaggataccactctattcgattaccccatcctttggaatttctcgtctatctgatttctctgttttatcattatcgcttaatcgttctcattgcatgtttcttagtttttgcaattactcgaccaacttactcgaccacacccagtgtctggcaacagactgtgcaatcgagtatagttgtcttgtttcctgtctattactcgaccagtacactcgaccacacccagtgtctggcaacagactatgcagttgagtatagctggttcatatcctgtctgttactcgacctgttactcgaccacatcctacttctgccatcagcctgttgtggtcgagtgattttagtaattcatttattgtttctgttttctgcatgttcgcttaggactgttaggaaccccaacactgttattgcttggcttgacttagtgacttctgatcacatctcatctatttgcatcacacccatttggattgacaccctaagtactacaacgacatgatagtgctataggattaattgattaaaaaactattatcaatttggcaccgttgccaattggatgtttgtttgctatatttgagattgtagaatacttaagatcaagttctttttcatttttactgaaagttactaactttgtgttttttgtgtttgtctgttttgattcaggtactgcgaatcaccagcttcaccacttggtactcgttgtatgcaaacacgatcacaaggaaatcagaatctcctattcaaagataacatctaccgtattgcacgccaactcagaacacaaacagcaacagacacaatggtagatgagcaagtacaaccaaaaaacataggtgcaggtgatgcaccacacaaccacaatcagcgtaatggcatcgtgcctccaccagtgcagaacagcaactttgagatcaagagcggtctcattgccatggttcagagcaacaagttccaccgcctccctatggaggatccactcgatcacctagacgagtttgataggctctgcagcataacaaagatcaatggagttagtgaggatggcttcaagctcagattgtttacattctctcttggagacaaaccccatcagtgggaaaagttgcttccttaaggctctatcacctcctggaattactgcaagaaagccttcttggctaagttttctcatactccaggactgcgagactaaggaatgatatttccggtttcacacagacaaataatgagactttctgcgaagcatgggagcgtttcaaaggttaccagacacaatgtcctcatcatggtttctacaaagcttcacttctcagcaccctctatagaggtgtccttcccaagatcatgatgcttcttaataacacttctaacgggaacttcctcaacaaagatgttgaagaaggatgggagctggtagagaacttggctcagtcaaatggcaactacaatgaagattacgatagaagcatctgccacagctctgattctgatgagaagcactgcagagaaatgaaagctatgaatgacaaatggacaagctactccttgtgcaacagaagcacattcattttctgggtgatgatgagacgttccaagtccaggatggggagactctgcagtcagaagaggtcagctatgtggaaaaccaaggaggttacaacaatggtttcaacaacttcaagcagaaccatcccaatctgtcttacagaagtacaaatattgcaaacccgcaggaccaagtctacccctctcagcagcagaatcaacccaagccctttgttccatacaaccaaggtcaggagtattttcctaagcagcagtatcagggcaactatccgcagcaacttccaccacctgggttcacacagcagcaacaacaaccagcttcaacaactccagattctgacttgaagaacatgttacagcagattctccaggaacaagcagcaggagcaatggatctcgccaagaagatggcagaaatccacaacaaggttgattgcactttcaacaatctgaatatcaaacttgaggcatttacctctaaggtcagatacatggaaagacaactacatcaacctctgctccaaaagtaacaggacttccagggaagtcaatctaaaacccgaaagaatacgccactgctcacgcaatcactatctgtcatgatcgagagctgcctactcgacatgtctccaactcaatcgctgaggacagtgatgttcaggacagggaggcttctactcatattgaaatttcagttgttggactcgaccattcagttggatcccgttttcaaactcagtccaacctagacgagaaagcaaccatcattgagaggatggtaaaacgattcaagccagcaccattaccttcacgtgctcttccatggaaattcaggaaagcatggatagaaagatacaattctcttgcagagaagcagcttgatgagatggaagcggtgatgcctctaatagaagttcacaacctgatctcgtatcctcacaaagatacgagaaagtcaattctggaaaggatcaagatttatcaagatttagaagacgaatgtaatgctaatccgtctagggccactgttaagaggagtgttcaagaaaaactggaagatcctggaactttcactctaccatgttccattggtcaattggttttcagcaattgtctatgtgatttgggagcttcagtaagcttaatgccactctccgtggcaaggaagttggaattcactcagtacaagccttgcgacatgactttgatccttgctgatatgtcttcaaggaaaccctttggcctgctacaagatctgccagtaaagattaatggagtggaagtacctacagatttcgttgtgcttgagatggaagcaaaacctaaggatcctctaatcctagggagacctttcttagcctcagtgggagcgatgatagatgtcaaagacgggagaataagtctcaaccttgggaagcacatcaagctgcagtttgacaacaacgaaactttgcaaaggacagctgtagaagaaaagatcagggctcaacctcaaccttcaaattcaatcaccagaccaagcacaacctctacacctgacttgcgagatctcaaaaagaaatttgatgagcaagaataaaccatagagaatctagctcagacagttgaggaacttaagagtaaattggatcagatgcaagagaaagctcaatcaaaatgcgggattgatactatcccgagaaaaaagtttacttcaagacggtctgaggagataaattatccaccagaagagaaagaggcctatttcgaggaaagaagaattgagtattcttctacgcatctctcaagagaggatgctgaatatgatgatgagatcagagaggactatgcagatcctctctatcacccattttcttcttaatgagtgtgaggagtcaagctagagactttaaacaagctcacttgggaggaattcccaagactgtttctgtaaataaaacttttattttctttttatttttgatttgtttttggttgtgtttgtgattctcaggaacagagaaacagcgtggaggtagagtaaaaatttaaaaaatttactctacagagcaacaagggatcgagtatgtgagaaattcaagaatttgaaaaacttttgttgcacttagaagccatgaggtcgagtaagttggtcgagtattagtgatgattttaaaaaccaaaattttgaaattatacttatactcgaccaacagaagctacagagacttggagggagtttaacaagtttacagaggattacagaaggttctagtcaacagggaacaatgcttcaggacaaacagaccaagtgcgtcccaccttctctcctttttgtcccccccccccacgcccttttagtgataaggaaatcccaaggcttcatcacagccactcgatccaacctcatctcttcacaccgacgccatctctccctcacaactctcactcgaccaaatctcactcgccatctctctcaccgactctctttcactcgattgcgatgtcctctccaatcgccgcttactcggccacctgacctttaccgtctctccgtcgtctccgttcactcaaccttgccgttcgaacttcaccattcctcacagcttcgtctccttctcactcgaccacaactcgacctctccgcgcttcatcttcatcttcatttactcgactttaccggagctcctcgccgttctagcttcgccatctctcactgctcaccatctctccttcactcgaccacttcacgcttcgcctcaacatctacgccagagtttctcgccattcaccgtgcttccgtcgcctccatactcgagtttactcgacctcacgccgttcactcaccgcaagcttgactcggccaccaaggaactcgcctccccctcctcaccccctctcaaccactcgacctcatcgttgccatctctaatcaaaaccgccaccatgttctctccattcgccgtttacttgaccaaactgccactacaatcaaccaaacaagccttgccaccattcactcaaccacgacgttaccgtctctcattcactttcactcgaccgcaaaaccgcaaaactcgaatccacaatttcaacgtactcgaccggtttaatcgaccgtgtactcggccggtttagtgtttgcgcttattaaaactaacatattgacgtttaggtttgagttgcatttttttccaggaaatcaatatgagttactacagtggcgagtcctctatggatgcggattacaacgtcgatgaaggtgagtcttggtcaactagaccggagagagagcaacaggcttatgagagtttcagagctgacacccaaagcttagtagcttgacgcaatgagaggagagctgaacgacttctagggaacgaggtacccctgttatcagactttagcccagctggggatactggaggacgtacatcacttatttgagaagtgtcatctggagacactgatgtcttacccgtacgtcgcctacaagaaggaaacaatagagtttctctccactcacagcagatgagctggagagtgaagggttgcggttcttgactttttcagtgagcgagcaccgttaccagctatctatcggagcttggaaggattgtttggtttcccaagtgaaaagggaactaaacccaagttcgagagggaagagttgaaggatttgtggttaactattgggaacgatatggcgctcaactctatgaggtccaagagcaaccagattcgaagccctgggatccagtactatcaacgctctgtagcgaatgttctgtactctatggaatctacaggcaccgtgtctaacacagacatggagatgattgattctgcactcacgggcattctccgctgaacaaaggggaagaagttcctaaagggcgacctcaatgatgctccaccggttatgcttctgttgatccacctctgtggatacaggaagtgggcgcacaccaacgggaagaagagggcgcgaagagccctttgtgtaggtggtgttgtgacaccaattctgatagcatgtggtgtacctctcacgtctccacggttcgatccgaggatgatggatttagatcacttgcgtcgttgtgagtttctggagcacgacatagttggcgatttctatcgctagaagttcgagcactccttgacccgaaaagccaacattctgcttccctgcactgaggccacaaccatactccagggcgaaaacattgacttcaagcctgcgcgtgattacatctactttgagagcgctccaccgactgatgacaacgtccctacaacagattctatagaggatgagattgctgagacagatgaggatagggaggaggagtacgatacgagcatgtatcatttcagtgagcatgtacctccagcgagggagagcaagagcttgagcgaagctcacagaaacaacagcaagttgcagaagtggtgcaagaaacaagataggctactcatcaagtgcttcaaggccatcaagtttctgactgacaagctaagctgctcctcttctaccacagctattccgcagggagagcctcctctagacatgccctcgaggagatatgacgcgtcagagccaagtcgccacaggccagagccagttcaacacaggcctgagcctagtgaccgagtagtctcataggtccctgcgaggcattcatcatttgagcctcgggagctcgggagaaagaagaaggctgcattggctcaatctggcagtaggagtacatgacttctccagtcccgaagcttacgtgaccgcggttctggccgcagcagaagaagagaggtcgagtatcatcagagcggtgctggccgcgacgaaggagcagaggtcgagtaaccccacggggaagctgagacacaacagggagattcttcgatggcatgggagcaatcacaggcagctattgacgaccaactccgttcctttttccactgaggtaagcacctcacttcaccattgtaatataccatctcttgtttttattttgtttctgtgatgtgttttgtcctcagtactctcttccaaatttggtcacacagtggactgtgtgatttaagtttgggggagggctcaagaagtgtgtgttgcattgtatataatctctagtctgcattcatctaagagcaagtctagcaagggtttttagtgggtttctatgttgggttttttaaaaaaaatgggcccggatgaaaaaaaacagaacaatccatttaggatcgttcctaaaattgggtttttcgcgacccaatagaaactcatacgtggcttcattttattgggtaaacgttttgactaaacaaaaaaaaaaaacacgcgtttttttgttttcttcttctctctgatttcttcgtggtcgccgacggagaccccaaatcgattctgcttctaaccaaatcgaaaccctcatcatggttcgtatctcttcttcttcgaatcgatttgattttatgagctttgaaattgaattttgaaagagattatgatctgattgcattggtatgtatattgaattacgaattctgggaatttttagttcgtgtactaagcttgagctgcatatgttgttattagcttgttcttagttttctatatgtttgcttcattctcagtgaagtcatattgttgtttctatattaacatagaaatttcagatctttatgtgtttgttctgtagctttgtttgtacctatatccttcaaagaaaaacttacggattcaggtatatgttttgttgtggtagatagaggagcattatgtggctcaaggtttaagtattgttggatactttgatttggttgtctgaaaagtttagatgtcgtgtattcattgcataaactggcttttgcttgttaatctttcaagccttcaaagcatctggacaacgattttgcattatgtatttgatcttttggtagttcgttttaattaagtttttgtttctatattttttctgaggttatttggaggatttgcaacaaagtttgctgcttcttaattgaatataatccaaatgcaaaggtggttggcttgagatcgaatgcaaggtaatttatcattttgtatttatttatgtgatcaatgctttgctgttatttactgtgataaatgcttctttgttgatataaaactgtagttagataaacgtcaattgcttttgtaggtaaacgtcaaatgctagttcttatagcatttaaaactgtaaaactgtgatgattgcttggtaggttaattttagtcaatagtatttagtatggcattgattgtgagttgtctaacaaagccataatttgcctttaaaacacaaaaccgtaacctttgatttttaaaacacacaaccacaaacaataatatgattcaccgaatccatatcatcatacttcaagctttataaaccttttgaacagtcaagatgacagtcacattctcccaccaaatccatatgaatgctttgaacttggatcagcaaatgtccctgtgtatagcactgagtggtctgatgatgatccaagtgaagatgaagcaccaattgctgggaaaaagggaagaaagggaagaaagggaagaaagtcaagaaaccaaagaggaattggtcatcaactgaagatgttgttctcataagtgggtggctgaacacttccaaggatccggtggtgggcaatgagcaaaagggggcagctttctgggaacgtatagcagcgtactacaactcaagtcccaagctcaaaggtgtggaaaagagaggccacatatgttgtaaacaaaggtggtcaaaagtgaatgatgttgtgaacaagtttgtagggagctacttggctgcaagcaaacaacaaacaagtggtcaaaatgatgatgatgtggtgtctttggcacatcagatcttctcaaaagattatggctgcaagtttacttgtgagcatgcttggagggagcttagatatgatcaaaagtggattgctcagtctactcatgggaaagcaaagagaagaaaatgtgaagatgactctgaacctgttggccttgaagacaaggaagctcgtcccattggtgttaaggcggccaaagccgcagccaaagccaaaggaaaaggcaagctaagtccggatgaaggtgaagaaaccaatgctttgaaggagataaaaagtatatgggagataaaagagaaagatcacgctgccaaagagaagctaatcattattaaagagaagaaaaataggactaagttgcttgagcgtctgttagggaaaacagaacctctatctgacatagagattgaactgaagaacaagttaatcaatgagttgttggcttgagtttcagttgtaggttaagtgtctgtttctagattatggttctctaagtgtctgttttaactctgtttttaagtttagtgtctgtttcaagtgtgtttttatatttagtgtctgttttttgtctatgttttatgtttaagtgtatgactatgttaatcaatgagttgtttcagtttatgagtttgagttgtttcactttggcactttcagtttcagtttatgagtttgagttgtttgactttcactttcacttcagttctgttctatttttgatctagtctccaagcttacttggtattttactgatgcagaacatgtgagaaagaagaaaatgaagagccaacaaaacaaaagttaggtcttgttccagacgaccagtttcttgctcaaaatccggttaagttttcttctgactcttaccttttttttttttttttggttgtatcttattagcagtcatacatttgcagaataacagaacagtaggattatggtttctattttagtcaactggttaacgagcttggttgtgctttggatcttcagtgtggagttttattattagttttctcgcacaaatttcttcatactgtatctgttctaaaaaattatggctatgtaggaatagaatttgggctacgaagaagtaaaaccagatacattttttcgatctgcaatagatgtatgattgaaggtatcaatgattacaagctttaaacatcaatctcctatgtatttttgatagaatttgcagacaatgaaacttaaacatgcacctttattagcttcacgctcactaatctgtagaatcattttctgccttggagctttgagtgtgtatatataacagaatcatatcgggtgaatcctgcagggacaattgagcttcactacctgttaggtcttgcaccacacatggagcatctaactgaggaaacagagccaacaaaacaaaagttaggtcttgtatcttactagcaacaaaaacgtttcagaaacgttgaaaaagttataagtccgtgctctttggaatgtattatatcattggcaaccaatttgtttgtttgtgaacattttcaatgattttggaccgcatttaattggagtcacatgtggacgcagaccgcatttaaccggtttgacaaaatatgtgtttcttttaacgatgacaaaccactactgaatcacagaatcataagccttgttttaatggagaagaaagaatatcaagtccaagtgtttgccattctttagtgccgacatcaagtactttagtatgtcaccaaggaatgtactttagttttgtcaccacaaacttgattgttcttttcatttgaaccattgattattgtaccattcatttgcaccattcactactcctttatattgtatgaatgaatgtacaccgaataaaaagaattccgaacacactactcctttattgttctatatataatccgaacactacttcaatatttctatcaactctctttatcataataataaacactcttttttatcaaatcatttttatctcttctctctttctataattttgctaaaatggcaggttcttcttcaaactataatctcgacgacatgttcgatgataagtttgatcaatgctttgatcaagcattagagagttatggtaatcgccaacgagtcaagccaaggaaaaaaaaaacatatatcgaaagaaatcgtgaagaaggtcacatccaattagtgaatgattattttacagagaatccaacatatcctccccatatattctgacgccggtttagaatgaacagaccgttgttcatgcgtatcgttgagaaattctccaatgaagtcccatactttaaacaaagaagagatgccaccggaagactcggtttctcggcactacagaagtctacagcagcaattcgtatgctcgcatatggtattgcggctgatgcggttgatgaatacctctgaattggtgaaagcacgtcgctgttatgtttggaacattttgcagaaggaaccataaatctgttcggggatgagtatctaagaagacccacacgagatgatcttatacgacttctccatattggagagcaacgtggatttcccgggatgataggaagcatcgactgtatgcattgggagtggaaaaattgtcccaccgcttggaaaggacaatatacacgttgatcaggaaaaccaacaatcgttttagaggccgttgcttcacaagatctctggatatggcacgcgttttttggacccccaggtaccttaaacgatatcaatgtttttgaccgctcaccagtttttgatgatatattacaaggtcgagctccgaaagtgaaatacgtagtcaacgggaaagactataatttggcttactacctcacagatggaatttatcctaaatgggctacatttatccaatcaatttcaattccacaaggtaataaagcttctttatttgctacaactcaagaagcttgtcgtaaagatgttgagcgtgctttcggagttttgcaagctcggtttgccattatcaaacatccagctctttttcatgataaggtgaaaattggcaatattatgcgagcatgtataatacttcacaatatgatagtagaggacgaacgagatggttacactcagtttgatgtatctgaattcgtacatccagaatcagctagctcttcacaagtggatttcacttatgctacagatatgccttcaaatctcggtaatatgatggccactagagctcgagttcgtgatcggattaaacatgaagaattgaaagctgatttagttgaacatgtatggcaacattataactagaatcaatcttaaaatgtaatcgtttttttttccgcttttaaatatgtttttttgcttcttctttctatatcatgtatgtttaaaatttgataattcttaatcataatcatatttgctcaaataaaaatatttaacaaattttctttttttcaaaatttttttgttttagaaacccacttaaggattccaccaatggaccaaaaaatttccaaaaactcgtaaaagtttctaaactacaaaactatccaaatttattaataaaaaatacatagaaactatactttagaaactaatcactggatttgctctaaggcatagaaaaaacccaaaaaaattgaaaaatttcagaaaatgatttcacaaaaacagtgttcatgtagttgcattgcatttaggatcgagtctagagtgtttcatttaggattgttacatatgcataggagataatgatgagatagccttataagcattttggttcaccagataaactcagtgccctcgttgttagttgtctgatgcgtagtcaatgaaatcgaagtaaaacagcaccatgcctacattgctctactcgaccatactgttaggatctgataccattccctatcaatttgaacttgaatctgatttagaattatcatgtcttggcatcgaattagaactcatggataccctaaaatacttggattttcttactcattttaaccactcttgttagtccaagtggctcactctcctttttagagcactaaactcgaacccaaacctaaactttctttcaagccctatatcacttgtgagtgtctgtgaggtcttattttgattgagcttggtagaaagtgttaggttcgtaacgacagagatagtgtctcatgtagttctagttcgcatttttcggactggataggactaggttggtgcttatatcatggggtgggatgtgtttaaaataaaagggtgaattcattgttgataaggaaagggaaagaatctagtaaaggttttgggaatgttaaagaaaagaatgaggttcttgttagctaaagaagaagggttaaaagcctttggttttaatgattaaaaataggaaccttagttgttaaagaaatccaaatccgctagatgtatcagagtgttgagaaagcttctcctagagttaagagaaaagaaaagaatgatatgaaaaagagtttaaaagattcacgagtgcaaagggtagagttaagttcttgtattggcactggagttgggagtaccattagagcttcatttttatactctgggtagatgggatcttatctctgtatgcatagcttgggacttacctttagcattctactaaagctcaatcattttttgagagatcccttgttactgaagcctattctgtaagggaccattaccttagccaaatgagttcattgatgatgcattgcttgattcacgttctagaactaatgaatcttaaagggattggtagatttgaaagcatgtgtaggtcgagtataagagacggattgattgataacaaggcatggctaacgtttttgagtaaaattcgatcatatcgcatcttagaactaccaacttggacattgattttatttgctctacctgatgctttggttctgagtccccaccttcaaacctctccttcaactatgtcttcttatttgcttgagggcaagcaaagactaagtttgggggagttgatatgtctataatttgcatgttttcagtgttcattcatcatcattttgagtctactttcatatcattcatcactgttttatatcatttcttatcattcttgcatactttgcatgattaggatagctttgcatacatattgcatttctgagttttttttaggtgattttaagctgtttgcgagcaaattggaagaagcgagccagaaccagaggacatactcgacccccaggccgagtacgtccagcacaatactcgaccccctggtcgagtgactttggagccattctacctatctactcgacccccaggtcgagtaaccgcaactcaggccactcgatgacattactcgacccccaggtcgagtatcatcactccccatgaacaccatcactcgaccaagtactcgatcacatctttggagtctactcaaatccgcactcaaccagacaagatgagcacaaggaagagaagaggagaagacgaagtgtttggaagcggcctggagccccatcggatcacgaagcccatcttggcccattatgactctatgggtcgggtgattaggttattggcccgtctactatcattttatttcgttttgtataaatagatgtcttagggttctgtcctgagacatctagttgactttgagtttttgcttcagttttattttctgttttactctggctgcaccgcttttgcttctacaacctgtaattcgagatttttccaagttattcagattccgcatttgatttcacctgtcatctactctttatctctttacttttgcaatattatcatttacctgcgtttatgtctttgagcatgttgtctgagtagtgacatagagttcttaaggatgggatagagtagttgtgcaatccgtagtctgtagaattgttaagttttagaattgattgaatcccttcaggactagttttgtttactgcttatttctttctgatcaactggaattcgatcccaagcattcccgcacccagaaggtgttcgatggaatgcttgatccactagttcctgagaattcgtctctatcccaagggatttgccgtttagagcgtttattaactttagcagtctgttcttattgccagcatagttagattccgttaatgggaattagtcttgctagctttgcttgaggatttctatcacgggagtgaattgatctgttgttgaacctattatctagggatagcttgattgcgcttgttaaccatttgaataggctaggataccactctattcgattaccccatccttaggaatttctcgtctatctgatttctctgttttatcattatcgcttcatcgttctcattgcctgtttcttagtttttgcaattactccaccaacttactcgaccacacccagtgtctggcaacagactgtgcagtcgagtatagctggttcatatcctgtctgttactcgacctgttactcgaccacatcctacttctggcatcagcctgttgtggtcgagtgattttagtaattcagttattgtttctgttttctgcatgttcgcttaggactgttagaaaccccaaaattgttattgcttggcttgacttagtgacttctgatcacatatcatctgtttgcatcacacccatttggattgacaccctaagtactacgacgacatgatagtgctataggattaattgattaaaaacctattatcaatacgttctaacaaagcaaaaagtttttattttatttcttttcaaagtatcattgggcaaggacgatgtatggaacgatgaacctactatatgatgaataagaccattacaaatgtgctaactcattccctaagtgacaaaatttgtaggacggacaatacctataaacccactaccggatctttctcctgaagtctcactatagagattctgtttgacctgacgttaactctattttatttggacgatttaacctcaccctaactctttctcatgaaggggtgttagatcaaggacacgagcatatacattcaggacttcttatccttttttatatctctctgctgatcctgattgctcatttttagtggttcctgcccttaaatcctatacgatttttaagcctcatgcattctcttttccttttttgtttagcaagtgtgtgcaaaaacgtcggagagaaaggaacaacacagtttcccgccacaaaaacgaaagaaagaagtaaaagagaaattgcaacaatgcgacctaagagcttattcttcattggaacaaattcaaaaaggtatgctcattagattcggtgattaggacatctgttttctcttccataaataaaaaagaagaaaataaaataataataataaaaaaaaaaaagaaggaaaggaaacatttcaactaagagagtccaatagcatatgataagtttcaaggaaagacatgggccatctaaaggagagatgagccaattacagaagggagccccaaatgacactctctattgagacagctcacgccacttataattaatgtagagagttaactaacgagattctagagttctctagtaggtccgagacggatggaaaaggatagtgaaagttttgggtctatagtgagaatgttctaacgagatgtctttgcctttatacgtccacgggatatattttagaacatggtctctgatagtaggagagttcccgctttttcaaaacagctccactagtctagctttgttgtttgcttgaggacaagcaaagtctaagtctaggggagttgataacatcgtatttttgcccatttttactatgttttattaggttttccatggagaaatcaagagttaaaggacacttcaaggtatattttgagtatttgggcttcaaggaagaattatgagttttcatgcaaaaaggagtagaaacgaccaaattccgtttcataacagtttatgtgcctcagatgtttagcatccggccaaggtctacccgatatcgtcatggaggtaacttggtttcattggaaagctaaaagagtcaagattaatttcgaagtcgaatcgaagaaagccatgaagccgttaagaagttatggcccaaagagtgaagacatgtcatagaatcgcggttttggaaatgatcaatctaaaaccgccgaccgaagagacttgaacccgggtgtcccctcaagtcttccatcgatcattagggtgcacaaccactccttcccttcatcttgccaccgacttcaagcctccctaagtagcccaggaacttggcccatcacttactaatcaatggaaggacgtttctaccatttgacctaatgaaaccctataaatataaggattaggggaaaccctaatcaaaccccacaaaattaggctgcctcctgctcctctcatggcctccaagccgtcctcctcttgttcttcatttgttttctcttttctcttctattattaattctctacttgtaaaagaaagaagattcatcaagctatggatttccatagaagatgtctaaacccttttcatactcatattctttttatgcaattgcttattcatatgatgttgtgttttttgaatatgtgtgagtagatctctagattggttttatggggtttcaaagggtattcatggggaccttagatcaagtttaagtttgcagtttctatggtttctttgatcgtttacactattctttctagttgaatttaatcttcatacatgtatgtccggaacgccacctagtacatgatcttatgttctttatacttggcagaatcttgtataattgctttaactaactaaactgaataaagaactacaaccgttgcacgcccgccgagtgatagggacttatggactagaatcggacttgaactaaatgctttggtcttgtatctcgaaaccatgttagcacctactagccgttagggaaactgagtacacgaggtattagtgagaatagccggcttccacctactagccattagggctagctggtcttgaatgagtttcgtatgtcctataatttggaagtaaacaaacctaaccatgatatcatctagattgggatctatacctttatgttgaaccatgatgccaggagaaaaccctaaagacctagagtttcgttttacttgctttacacagctcttcttattgacatttacttttattgcatttttgtagtttacatctattgctttcttatttccattgaattctttactaattttcattgcattcacaaaacccccactctttcgtttgtcttgatccaggttacgttacttgaattattccttgtagctacactccacatggattcgatccataaatactactctgatatattgtgcacttgcagtaatcgtgtggtctttcaggtaaaagcctaaggcgaaataaaaatcgcatcacacggctatccattctcgatccaatccaaacaatggcaaaaccaacaatggtaatacctaatcccattctcgactaactcgagacataccggtttacctaatcgcttttacgactcatttactcaataaaacttttagaaacgtttgtcccatgagcatcatgaaccatgctcaaataccaacaattgtaacccctctgaatcgctctgtggccagacaagccaagggaaacccggaaacgtcacgttgatagctctcacagacaacccaacttaggttccaaacggatttagacccttagtcggatcacccacatgaaccatccctcatgaacggggtttaggcttttcaacccttgacatgaccgtgagttgggttaatccggacaagactaatatcgaataaaaaacactctttatacgaaaataatactttataacatataaattctcgtacaaccaagtatccagtacgtttaaacaatgggcccttgagcatacacgctcaaatccgacaagaaccaaaatcattacgttttgcaaaaagcaacaaactctatacaggctttcctacgtcccgagcatccctctaatggttcccactacggtgtcccgcaaaacaaattagaatcataagtaatctaagataacttactgagctcggtctacctgcaacagatattagttccccatcctgaaacacgcaacagagaatagcaacgaaaggtagcttgccgaagcatctaccaaaacatgcacgtggaattttgactacaaattttattaagttttaaagggcttgatatactgccttcaaacacccccacaccaaaaatacactcttgggatctcttgctttagaaccacataggcatgtaaccagagcatccctaccaaaccctacaccattatgtagacaagtcggccagggtagctaaccccgtctctccaagcccttcgcactacatggcaatcaagtaacaacgttaacaagaccccacgatagcacggttcactacaaaggttagacatatcacaatcttgatacgcttattgtcactacctcctaccacgagcaccacgcatcaagaccccaaaatttctagatattatgaaacatatggtcactcaaacacatagaatcatcaatatccttactcaactcaacctccaaaccataagccttaaagcataagagtctaaaaaatctcatatgcgtcttattaccacctttcacaccattaatcaatactcatgaaattattcaatgaatgcaagagtatgatcatgcaaacaaacaagcaatcaatcacccaaataaacacccaaacttatcatgtgccatatcacatgcttcgagactcacagagattcgtctgaaggttcaaggttagcttcaacaattctcggtcccggacaaggatttctcattcacggacaagttttcttcaaacacggacaaagggtcttgatcatgggcagagtttctcgatggtaacactttttcaccatttctcggtcggatggtcactttaaaactcggcagcctctccgtttccctctctttttcctctcagaatactttaggccgaatggagtttatatagggacggcatgggcgagtcatcaaggacacctgtcatctgcctgtgatgacacgcaagcagccttaatgggatggtaacacgtggaatggggaaacttcagctccaagggtggtggattttggctccactccacataaattcggctccaagctactttgcttgggcttcaagtcaaccggctcgtgcatccttgagcagcatctctcgattggcaaaaattctctatcagtagagtctctcgatcggcagaattctcgatcggcaaaaattctctatctgtagaattctctcgatcagcggaattcacgataagtagattctatcgatcggctagactctctatcggcagaattctctcgatcggcagaattcacgatcgacaaattctatcgatcggctagattattcggactcgacgttttgtttcccatcactcggccaagttcatgtccatcttctcggctttcattccttagcaaattctttctcctttgaagtttggtgaaattttctttctcttattaaagttaataagcagtctcaacatccaatcttttgggctagaatctacaaatctctggaattcgtagataaggcatctatttaaacgtcttttagacgctggaataccttgggtcgaattccaaactgaactgagagaaataagcattatgctcaacgaatccagaagggagctaacctaatcttaaccacctcactaactcagaaattactctaatctaatccatcctcaagaaccccaatcagtactcaagcaacataatctaaacatatcaaaatatagatctaaacaagataaataactttactcaaataaataaatgcaaaaatgaaatagattaagagtaattaaggtttcaagattataaaacacaaagaaaaactacataataaaagcttggtcctttggggtttactaaaatcttgaaagcccttgattcactagaagacaagagacttgaggcggtttagatgtatactcgacattcgggatcgagtaaaaagggtgctgcaaagtctgcgccttcgcctctatgctccgagtaatttcttcttcctctcctcttctaatgctcatccgtatggttgagtggggaaatgaggaggaactaaaggcgctttgatcgatcaacaagtaaggtagaatcctttagccttggtcgagtgattggtcgagtagtggatcgagtagggggtcgagtggatgtttgttgcttcccctgcggctgccttgatagagtgattggtcgagtagctgatctatgaggactacctgctgtgcaagcttttcccttactcacttactggggatgttgcttcttggttgaagcaattgaaggctggttcactcactacttggagaagcatcaagttagccttcctgaacaacttctatgatgatgctaagtctgaggagctgcaaacaagctgtctacctttactcaaggtccgacagaagctttcaaggcagccttggttcgtttcaaatagtatcaatgggactacctgtaacgcccccgaatcgctctatggccaaacaagccaagggtaacccaaaaacgctacgatgatagctcacacagactacccaacttaggttccaaacaaatttatacccttagccggattacccacatgaaccatccctcacgacacggttaaggatttttaacccttgccatgatcgtgagttatgttagtccggataagactactatcgcatgaaacccactctttataagaaaataatcttttataacatataaattttgtacaaccaagtatccaaacattttaacaatgggcccttgagcatagacgctcaaatccaatcgagaaccaaaaccattaagttttgcaaaaagcaacaaaactctatatcggctttcttacgtcctgagcatccctctaatggttcacactaagttttcctgcaaaacaaaatggaaccataagtaatctaagattacttagtaagctcggtctacctgcaaccgatattagttccccatcccacgcaaaacagaatagcaacaaaaggtagcttgcccaagcatctaccaaatgcacatgcaattaagactccacttttattaagtatttatttttaaaaagggcccggtatgctgccttcaccccacaccaaacacacactccctggatctctcgctttacaaccacaaaggcatgtaaccagagcatctctaccaaatgctacaccgtcgtgtagacaactcggccaaggtagctagatccgtctctctcagcccttcgcactaactggcgatcaagcaacaatttaacaagaccccacaatagcacggttcactacgtaggtcagacataccacgatcttgatacgcttatagtctctgcctcctaccacgagcaccacgcatcaaaacccaacattttaagatattatgaaacatatggttaatcaaacacatagaatcatcaaaatctcaacacaacctcacaaccataaactttaccttaaaaatctaaaagatcaattatgcgacttagtaccatcattcacaccattaatcaatactcatataattcatgaaatcatgtaatgaatgcaagagtacatgatcatgcaaccaaacaagcaatcaatcacccaaataaacacccaaacctatcatgtgccatatcacacgcttcgatactcatagagattcggttgaaggtttaaggttagcttcaacgattctcggttgcagagagggatttctcatcgacaaacaggttctcttgatcacggacatgaattctttagttaggggcaaaggatcttgattacgggaagagtttctcaattgcggacaagttttctctcggttacgtgcgatcccttgataatttggctgcctttcggttctctctcctttctccctccgaaaattctcaaggccgaatgaagcttatataggggtggcaggggtgaatcagctagtacacgtgccgtttgcacgtgaagtcactcatgtggcagcgtcgggacgatgacacgcggatagcaagacttcggctccaagggacttaacttcggctccaatcctttaaaattcgtctccaagcaactttgcttgggctccaagttagccagtgcactcgtctatggcacggtcaaacggcggttaacacctgacggggcacactttgcccacagcacgcctgaggcccaatcttgcccattcttgcccatctttgcccattcttgcgtaaatagttatttcatttgccctttgatggtttatcaccttttgggcacatatgggcaatcagccatgtattcgtggcaacttcctcccgttttggcttcgccccggatgaccccatttcgaactagactcggcaggttcattttgccttgcccatctctttggatttcatcccttaactatttctttctcttccagttcttcctcgatctttccttgatgtttcgtgcttggccacttaccccttagcgagggtcactacattgcccgtatcatggttttagtgaggtacaaattctaggtaccttctttagaggagttgatcaaagataccagatggctcttgattcagagaggaatgttaacttcaataccaggtatccggcagatgctacatctttgagcctgagcctgagtcagaagaaggtgtcttctacattgatggtcaaggttacaagaactttggacagccagaaggcaactttagtggcaacaggtttactgggaacaagagttcttcaggtttcagccccaaacctaccttccagaagacctatcctcagagcaacttcacaaggtcttatggtaattcttcttaccaaacccctcctccaccgtctgcccatagtaagatggaatccatgcttgagtagattcttgagggtcaggccaagttagttgtggacttcaatagaaagtttgacgctatctacacagatcttcatgggaagatcgacaatttgagctctcacatgaagaagctagatgttcaattggcttaaactgattagtctatcaagagacaagagggttttctttctggcacccctaatactaatccaacgaagagctgcaatgttatcttagtcagagatggagacaatgtataggaggaattggatacagaggacgagttggagctcacagctctagagctggtgtcgatcgacaccatatggtaaactcttttccaaaactacttctgaatagagtgtcgatggacacactcctaacgtcgatcgacaatgggtacgcattgcaccttacgagggtcatatccctatgcaacccaaccttgtttacactcttacggttccatatccgagaaaccgtcgttctaagcaggaagtacacgatacgaagtgcaaggcaataaaggagaagaacttgaccaccattcctaaggatacctcagagaactcatttgctcaacttattagatatgtcaagcatttggtcaacattggaatcaactccaaggaagccaacctgcttaaagagatatcagttccatactgttgaagaaggtcaagaaagactagtcgaagagattagtgctttctgaacatgttagctccattgccaaagggtaaatgataacactgtattttactcattttaggtgtatgtttatcatcatttacttttgcatttgctcattgtatcatatcattttgcaccattttagcttgttttgcatacttaggcatctaggatcatcttgcatatgcattgcatgttttggtatgttttcaggtgcagaaggagataaaaaggactctactcgatccatccactcgatccaggcagctacagaagaggcatcattctactcgacctctttactcaatccaggatgctacaaaggaggctgcagttaactcgaccctcttactcgatcaaggcaacctcagatgaagaagcagattgatctactcgcccctcctactcgatccatttactcgaccaagggtgaccatctctacaagacttgttgagctatcaaagcgtcttcggatcctcctcattccccactcaaccagacatctgagcatacatataggagaggagaagcatctactcgaccaattgatcactcggagcatagacacaaaggcgcagactttgcagcaccctctttactttatccccaagatcgagtattcgcccaaaccgcctcaagtctcttgtcttctagtgaatctagggtttcaacattttactataaatagatcactttgggggttgtccaaaggatctatgctttatctttcagtttttctttgtgtttatgaatcttaaaaccttaattactcttaatctgtttcgtttttgcatttagttgttttagtaaagttgtttagcttgtttagatctatattttggtataattttagtaatatctgggtttgtgttcttgagaatgttgtttaagtagtgattagggttcttgaggatgaattagattagggtaatctctaggttagttaggtggttactgtttaactttatacccttctggattcgcttggcccctatgtggtttttgctggctaatgtggagattcgatcatagacgtccattgtccaaaagatgttcaaatggatgtctgacctacgaattccagagatttgtagactcgaccaagagattggcttgtctgcctattggctttggtagattgtttcgtaaaccctgctcttctatgtttcatcaacgagagttgagattaggaagtggtagagttatgggggtctctatcacgagagtggattgacccggtttttgaatctatcgtcatgggtatctacctttcgcctattagccatctgatgaaccctagagttgcccttatcaatgaatccatccttagaacttctattagatttatttgtatcccttgttaattgcacttttatttacctgttatttgtatcccctgttgattgcatttaggttacttaattttgttgcatgtttgttctactcgacccaatgatcgagtagggctctttaagttctcatttttacttgtttgaatcctgacctaggattgttactagaaacccaccatctttataatctggcttgacttagttatttctgtacagatcttgattgctagcaataacagtagactggatagacaccccttatagctgcatcgacatgtttgtgttttaggggaattgaactgaatcacacattcaccctaagcaggcatgaaaaacctgctttcaatttggcgccgttgccaattcattgttgcattgttacattcaagatatcagaaacttttaagatcaaattcttttacatttataaagttactaactcatattttcgtttgcttgtttttgtggtataggtactaatctttgtgcatgcaaactcgatcgaaaggttctacacacctactaccattcagagattgaattgacagaatagctcgtgagttatggatcaacaaaacagcaaagaccagctgctatggatcaacaaaacagaccaattgatgttcaagacatctaatgttgatcaaccaagaaacattggtgctggtgatgccccaagaatcatcaccaaagacaagggatagtgccttccaccagttcagaacaacaactatgagatcaagagtggtctcatctcaatgatccaaggaaacaagtttcatggtttacctatggaagatcccctggaccatcttgtcagctttgataggctttgtggccttacgaagatcaatggtgtcactgaagatatgtttaagctcagactatttcccttctctttgggagacaaggcacaccactgggagaagactctacccccagattccatcacctcatgggacgattgtaagaaagcttttcttgccaagttcttctctaacgctcgcaccactagattgaggaacgagatctcaggtttcaaccacaaaaacaatgaaactttttgtgaagcttgggagaggtttaaaagctacacaactcagtgcccccatcacagtttcaagaaggcttcattattgagcacactctacaaaggagctttaccaaagatcagaatgctacttggcactgcctccaatggaaacttcttgaacaaggatgtagtagaaggatgggagttagccgaaaatctagcacaatctgatgggtgctacaatgaagactatgatcgctcaatgagaggaagtggaggcagtgaggacaaacagagcaaagatatcaaggctgtgaatgaaaagctagacaagctgttgctggctcaacataagcagatacattacatcactgatgaagagcacttccaaatgcaagaaagggggaatgaaaactgaagagctgtgttacattcagaaccaaggagggttcaacaaggggtacaacaactacaagcccaacccaaatctctcctacagaagcactaatgtagctaacccccaagatcaagtgtatcgaccacgacataatgagtctaagccatttgttcagtacaaccaaggttatgtccctaaacaacagtttcatggaggctaccaacagcaaaatccaccaccagggttcactcaacaaccacaacaagtcctagtagctcaagatcatgaaattaagcaactcattcaacaaatcatcctaggacaagctataggagccatggcttttgacaagaagataactgaattacacaacaagatcgattgttcttacaactatgtaaatgtcaagttcgaagctctgaattcaaaaatcaagtatttggagagtcaaattgcatccacctctgctctgaagcatcctcagcaacttccagggcaagcagtccaaaatcttaaggactatgccactgctaatgctaccaccatccaccaagaagatgagtctccatcaagtcatcagactctcaatactgaggacagtatgattcaagaagggggggattcaactcaaattgctgcacctgccacccagcaattcatctggactattgagcacacacctttgctgaatactcaacattttggaaaaagttcaacactgaaaaactcaagaatgatcagaatcaagagatgattagcagcgcctccactcaagaagcatacaagaagaaagtcatccaagaaaagcttgatgatcccggttcattcactatgtcatgctctctaggaccattgacattcaataggtgcctttgtgatttgggagcatctgttagccttatgcctctctctacagctaaaaggctagggatcatggaatacaagttctgcaacttagctttactcttagttgatggttctattgcacatcttcacggtctaatagagaatctgcctgtcaagattggaaatgttgagatacctacagattttgtggtattggacgtagatgaagaaggcaaggatcccctgatcctaggtagcctattcttagcttcagctggagcagtcatagatgtcaggaatgaaaaaattaatctgaaccttgaaaaaggcatcaagatgaagttttacattagagaagcttcagggaaatcaacaacatgagttcagaattttgggattcaggacatggatgttgatgaagaaacagaagttggaacctcaccaaaagtcaactatacttctcaactcagcaagctgaagagaacttttgaccacaagaagaaagcaacagaaaggctagctcagattgaagatcctacagaagatgactggtatgagatgagaaaaaaatttaaatggcaaagcagagtcatagagggattatcttcaagggtgatgaagctgaaagatcggctatggatgtgtgaaaaaagagtcaataaattttcaaatggtattgatcgagagaagatggaaactgcactagctatcaaggaggacgaaaatttcacaacataatggtttgcaccaaaagattagacaggagttcacttagaggaaagaagcctagagagcaagttgttgagtgaggaggaaactcctattctgacttattctccaggagtacctaaaccaaccaccaacccctctacttaagaagaacacttgattcatgattctgttgctgaagaagtcctggtgctgtgggttggatacaaagctcaagaggataccattggggaggtaacttacaagatggaaggactgaaccatgcaatcttggaacttcaagaaatggttaaaggctaccccaattttgaatttgaggattggtcaaaggaacctggttcagaagaagaagattactctgctgatcagaaggaagcttattttgaagaaaaatcaaatgagtactcatcctaccatatctcaagagaggatgtaaagtatgattcaagcattaaaaattcaaccactaaagatgaggacttctctgatcctctcttaaaccttttttctaactaagctctataagagtcaagcttagtgacttaaaacaagctcacttgggaggaagtcccatgtcaatccatgtatataactttttatttttccttgttatttttgatgtttttgtttaagtgtttcaggtttgttttagtgaccctaagggagtcaacggtcgagtaaatttaaaccaagtcaagaaaaatctcaaccgttgatcgagtagaatggggaggagcattttgagccattgatttggatgaccaaatgagaggagcatcaccaccgtttgatcgagtgaattcctgaagttcattttggtctgtttgatcgagtaaacaagaatgaggagctctccaccgttggatcgaattttgcgtaactcaagaagatgctcgattctttactcgagctctcattatttggagaccaaagctttgaagttttcattccaaacccttcccctaaaacgctccctatcactctttaagaatctgttccccttcaccaatacatcaccaaagttactcaatcactccaaagtctatcctcaagcattcaatcggtttcaagctccaaatttcatcaccaaagaaaccgattcccttctcctttgatacctcttagagaagtgttcttgtttgccttgtcaaagctcaccaccaatctccatggattcaagaaggaagagttcatctcgggcaagaagatcctctgttgataatgaggaagttgaggtgtttgacatgagtggcatgactgaacgccaaatttgccaagctcgccgtgctcaaaaaacaagcttgattcaaggaggaagctcaagccgctcaaccatgcaaagagaagaagtagctcggggaaagaggctcgttgaagctgaagaagaacaccatgaagaggctccctttgaagaagcggtttctgcggaagagtttgagatcatcggggatgatacaccaacccctgttgggagaagaaaccgaccaaggaggaagagagagccaaccccgagcgagtaatatcaatatttgagggagttgaagtttgagggaactagataccctcataaggaaacgatgcaagagcttggtatttaaggtgatgttgaatacttgatggaattggccaatcttgcaacattgatgagctgccaatgtgggggatacaaagaggagagctgccaactccatgcaaccctcaaggttcatttctgtgttgatgattcagagaaaaaagagagaggaggtcttggttacataactttcaaagttagggatgtcgattatactcttgatatttgccaccttgataccatttttgggttccgaagtggagaaggaatccgcgaagactatgatcaagaagagctgaaatctctttggaagacaatagccggtctgaagcccttcttgccaaccaagagcaagagttcttcaatctgtaatcccgtgattagatacctccaccaatgcattgccaacaccctctttccaaagaaggccaccggatttgttagtgaagaggagttgtgcatgatagaccaatctttagtcttcattttgagggagacaagagatgagaggaagatggcgggtgatagagcggacacctcgttgagtgttgttatcttggatcacttattcagttacaaggagtatgctgcaaccatccatcgcgcgggaattcgcgggagtctttgtgttggtggtctcttaacgccaatactaggagctgtgggtatggaattcggaacccctgacgtgttgcctaagttcattgacctagactatctcaaggggaaggattttcttgagaaaacaactccggcggatcactatctcttcaagttcaaccactcggagcttggaccttctcttctacccctaccatgcgagaaccggacttcggtgaagacaaggcgcaacatcaattttatgccatctccctctgccttgaacatagacattcgaggagctcgggaagatgaactagaatgtagtccagtcgactatgagcaacatgagtactttactcaagctaattatgaggagcaaatcgagtttgagcaacatattgatcaacccggagcaagggaccaccgaacaagagcaagctcattatgaagaaggtgctaaccaagagggagatgagatagctgaagttcacaagaagctcggtgtgcttgaagagcttggaaaccttcacagcaagacaaaaaagagtttcaagaagaagatgagaacaatgaagaagtcattgaagagtatggctgctcaactcaaggatttccagagcaagccaacgccaccgtcttccaaccccgaagtaagaagaagcggttcaacgagctcagctacaaggagagctgaaaggatcgatcaaccccgagcttcatcttttgagcctcgggaaatgatctccgagtagagagatccaaggagtaggcagagacgagcttcacacgctcgaccggacagaacgagcaacaccctcccgcctcaacttcagcccctgcctatacccaagagagtatggatgactatgtctccatctacatcacctgatcactgaggtaacaccacctcactcattgtacataccattagcatttttttttttcttgtgtgttgtttgttttggtcttgaattctctttcagatttttattacacaagggactgtgtaatttaagtttgggagagggttcaagacatgtttaacattgtgttctcttttcttatttcaaattttgcatcatctctggcatagaaaaaccataaaaatttgaaaaaaattcagaaaatgatttcatcaaaaacagagtgacatatagattgcatattattttaggattgtatatagtgtgcttgcatttaggattgctcatttgcataggggataatgatgatttcaaaccgataagcatgttttgattcaatgaagtaagttcaatgcccatgttgttagttctctgttgcataactgattgtatctctgaagtaagaccgcactctgctttgaatttgtaacttgactatactactttgatcgaaactcgcttatctgatgtcattccctatctattagaacctgaactgaatttgcaattatcatgcttatgcattgtttgtgaactcatggctaccatatacatacttggatcatcttattcatttcatcaccctctgttaatccaagtagctgtctctcattcttagagcagttttccacacccttagcctagccttatttcaagccaaagatcatttgtttgtgattgtgaggtctttttcgattgagcttggtataacatgttaggtatgagccgacaagagaagtctttcatgtagacctagcccatgctttttgggttagataggactaggtggagacttgtatttgggattgagaatgtgtatggaatgaatgggaatgagagtgagaatgagaatgaaaaaaaaaaaaaaaaaaaagagagtaagagtttagagttctaagggggatacaaaagtgttaagtctagtaaagggtttggaatttaaagaagttaggaagtgtgattcaaagaaaagggtaaatcgccctatgtgctaagattagaagaaaagccttaagtttgtcaaagtatgaaaccaaacccgctagactcttaaatcgtttcaaagggaaccccttagaacttgaaccaaaaagagagaaagaatgagaaaaagggtagagttaggacatctatgggactgggatcatcttctgagctatcatattatatcattgggtagatgggagtttgtttttgtatgtgtccattggcttttacctttagcattctactgaagctcaatcttttctttgagagtcccctgttactcgaccaatcactagagggaccatttttgtctcttagcctaagcccgaaaccaaatgagttcataaccattgcattgcttgatccactgtttgtgcttaatgaatgttaaagggaattggttgatgtgaatgcttgaatagattaaggcaagttgttaggtttcattgtaacgagtatggctaacatttttaagtaaaggtctatcatcttgcaacctagaattagctacctagacattgagcttacccgttttatagacatgcttcggtttttgaatccccacctttaaacctctccttcaacttaagattttttgtttgcttgagggcaagcaagagataagtttgggggagttgataacactgtattttactcattttaggtgtatgtttatcatcatttagctttgcatttgctcattgtatcatatcattgtgcaccattttagcttgttctgcatacttaggcatctatgatcatcttgcatatgcattgcattgtttggtgtattttcaggtgtagaaggagctaaaaaggactctactcgatccattcactcgatccattcactcgatccaggcagctacagaagaggcatcattctacttgacctctttactcgatccaggatgctacaaaggaggctgcactttactcgaccatcttactcgatcaaggcaacctcagatgaagcatcagattgatctactcgcccctcctactcgatccactactcgatccatttactcgaccaagggtgaccatctctacaagacttgttgagttatcaaagcgtctttggatcctcctcattccccactcaaccagacatctgagcatacggataggagaggaagaagcatatactcgaccaattgatcactcggagcatagacacaaaggcgcagactttgcagcaccctctttactttatccccaagatcgagtattcgcccaaaccgcctcaagtctcttgtcttctagtgaatctagggtttcaacattttactataaatagatcactttggggtttgtccaaaggatctatgctttatcattcagtttttctttgtgtttatgaatcttaaaaccttaattactcttaatctatttcgtttttgcatttagttgttttagtaaagttgtttggcttatttagatctacattttggtatgattttagtaatttctgggtttatgttcttgagaatgttgtttggctagtgattagggttcttgaggatggattagattagggtaatctctaggttagttaggtggttagtgtttaggtttatacccttctggattcgtttggcccctatgcggtttttgctggctaatgtggagattcgatcatagacgtccagcatccaaaagaagttcaaatggatgtctgacctacaaattccagagatttgtaaactcgaccaaaagattggcttgtctgcctatttgctttggtagattgtttcttaaaccctgctatgctatgtttcatcaacgagagttgagattaggaagtggtagagttatgggggtctctgtcacgagagtggattgacccggtttttgaatctatcgtcatgagtatctacctttcgcctattagccatctgatgaaccctagagttgcccttatcaatgaatccatccttagaacttctattagatttatttgtatcccttgttgattgcacttttatttacctgttatttgtatcccctattagtatcccctgttgattgcattttgttacttaattttgttgcctgttggttctactcgacccaatgatcgagtagggctctttaagttctcatttttacttgtttgaatcatttcctaggattgttactagaaacccaccatctttataatctggcttgacttagttgtttctgtacacatcttgattgctagcaaaaacagtggactagattgacaccccttatagctgcatcgacatgtttgtgttttaggggaattgaactgaatcacacattcaccataagcaggcgtgaaaaacctgcttatcaatttgacaccgttgccaattgattgttgcactgttacattcaagatatcagaaacttttaagatcaaaatcttttacatttatcaagttactaactcatattttcgtttgcttgtttttgtggtataggtactaatctttgtgcatgcaaactcgatccaaaggttttgcacacctactaccatttggagatagaattgacagaatagctcgtgagttacaagaaaccaaaacaaaggcagcctgtgatcagtaaagaccagctgttatggatcaacagaacagaccagttgatgttcaagacccacctaatgttgatcgaccaagaaacattggtgctggtgatgccccaaggaatcatcaccaaagacaagggatagtgcctccaccagttcagaacaacaaatttgaaaacaagaatggactcatctcaatgatccaagaaaacaagtttcatggtttacgtatggaagaccccctggaccatcttgacagctttgataggctctgtggccttaccaagatcaatggtgtcactgaagatatgtttaagctaagactattttccttctctttaggagacaaggcacaccacttggagaagactctaccccagattccatcacctcatggaacgattataagaaagcttttcttgccatgttcttttctaacgctcacaccgctagattgaggaacaagatctcgggtttcaaccaccaaaacaatgaaactttctgtgaagcttgggagaggtttaaaagctacacaactcagtgcccccatcacgatttcaagaaggcttcattattgagcacactctacaaaggagctttaccaaagatcagaatgctacttgacactgcctccaatggaaacttcttgaataaggatgtagcagaaggatgggagttagtcgaaaatctagcacaatctgatgggtgctacaatgaagactatgatcgctcaatgagaggaactggaggcagtgaggacaaacagagcaaagctatcaaggctctgaatgagaagctagacaagctgttgctggctcagctgaagaagatacactacatcactgatgaagagcactttcaaatgcaagaaggggggaatgatcaaactgaagagctgtgctacattcagaactaaggagggttcaacaaggggtacaacaactacaagcccaacccaaacctctcctacataagcactaatgtagctaacccccaagatcaagtgtatccaccacaacagaatcagtctaagccatttgttcagtacaaccacggttatttccctaaacaacagtttaatggaggctaccaacagcagaatccaccaccatggttcactcaacaaccacaataagcccagtagctcaagatcctgaaattaagtaacttattcaacaaatcatccaaggacaagctataggagccatggcttttgacaagaagataactgaattacacaacaagatcgattgttcttacaacgatagccttatgcctctctctacagctaaaaggctagggatcatggaatacaagttctgcaacttagctttactcttagttgatggttctgttgcacatcctcacggtctaatagagaatctgcctgtcatgattggaaatattgagctacctacagattttgttgtattggacgtagatgaagaaggcaaggatcccttgatcgtaggcagaccattcttagcttcagctggagcagtcatagatgtcaggaatggaaaaattaatctgaaccttgaaaaaggcatcaagatgaagtttgacatcagagaagctttagggaaatcaacaacaggagttcagaattttgggattcaggacatggatgttgatgaagaaacagaagctggaacctcaccaaaagtcaactatacttctcaactcagcaagctgaagtgaacttttgaccacaagaagagagcaacagaaaggctagctcagactgaagatcctacagaagatgactggtatgagatgagaaaaaaatttaaatggcaaagcaaagtcatagaggaattatcttcaagggtgatgaagctgaaagatcagctatggatgtttaaaaagagtcaatcaattttcaaatggtattgattcacagaagatggaaattgcactagctatcaaggaggacgaaaatttcacaacagaatggtttgcaccaaaagattagaaaggagttcacttagaggaaagaagtccagagagcaagttgttgagtgaggaggaaactcctattccgacttattctccaggagtacctaaaccaacaaccaacccctctgctgaagaagaacacttgattcgtgattctgttgctgaagaagtcctcgagctgtgggttggatacaaagctcaagaagataccattggggagctaacttacaagatggaaggactgaaccatgcaatcttagaacttcaagaaatggttaaacgctacccaagttttaaatttgaggattggtcaaaggaacctggttcagaagaagaagattactctcctgatcagaaggaagcttattttgaagaaaaatcaaatgagtactcatcctaccatatctcaagagaggatgcagagtatcatacaagcattgaaaattcaaccactaaagatgaggacttctctgatcctctcttcaaccttttttctgactaagctctgtaagagtcaagtttagtgacttaaaacaagctcacttgggaggaagtcccatctcaatccatatatataattttctatttttcttgttatttttgacgtttttgtttaagtgtttcaggtttgttttagttaccctaagggagtcaacggtctagtaaatttaaaccaagtcaagaaaaatcttaaccattgatcgagtagaatggggaggagcattttgagccattgatttggatgaccaaatgagaggagcatcaccaccgtttgatcgagtgaattcctgaagttcattttggtctgtttgatcgagtaaacaagaatgaggagctctccaccgttggatcgaattttgcgcaactcaagaagatgctcgattctttactcgagctctcattatttggagaacaaagcctaatttcgtgactccacttgctcccccaacactcctttactcgacggataaatctattacccatacccctcaccatttccaatcaacttttctatctcttccaaagcaaaccaaagaccaatctcttccacccattgatttcgacaaaccctcattgaaactctctctttcataatctcgttttcgcaaccccctcacaaagctttgaagtcttcattccaaacctttcccctaaaacgcaccctatcactctttaagaatctgttccccttcaccaatacttcaccaaagttactcgatcactccaaagtctatcctaaagcattcaatcggtttcaagctccaaatttcatcaccaaagaaacttattcccttctcctttgatacctcttagagaagtgttcttgtttgccctgtcaaagctcaccaccaatctccatggattttagaaggaagagttcatctcgggcatgaagatcctctgtttataatgaggaagttgaggcatttgacatgagtggcatgactgaacgccaaattcgccaagctcgccgtgctcaaagaacaagcttgattcaaggaggaagctcaagccgctcaaccatgcaaagagaagaagtagctaggggaaagaggttcgttgaagctgaagaagacaccatgaagaggctccctttgaagaagcggtttctgaggaagaggttgagatcatcagggatgatacaccaacccctgttgggagaagaaaccgaccaaggaggaagagagagccaaccccgagcgagtactatcactatttgaaggagttgaagtttgagggaactagataccctcataaggaaaagatgcaagagcttggtatttgtggtgatgttgaatacttgatggaattggccaatcttgcaacattcatgagctgccaaatgtggggtatacaaagaggagagctgccaactccttgcaaccctcaaggttcatttctgtgtcaatgattcggagaagaagagagaggaggtcttggttacataactttcaaagttagggatgtcgagtatactcttgatatttgccaccttgataccattttcgggttcccaagtggagaaggaatccgccaagactatgatcaagaagagctgaaatctctttggaagacaataaccggtctgaagcccttcttgccaaccaagaccaagagttcttcaatccgtaatcccgtgattagatacctccaccaatgcatcgccaacaccctctttccaaaaaaggccaccagatttgttagtgaagaggagttgtgcatgatagaccaatctttggtcttcattttaagggagacaagagatgggaggaagatggcaggtgatagagcggacacctcattgagtgttgttatcttggatcacttattgagttacaaggagtatgctgcaaccatccatcgctcgggaattcgcgggagtctttgtgttgctggtctcttaacgccaatactagaagttgtgggtatggaattcggaacccctgacgtgttgcctaagttcattgacctagactatctcaagaggaaggattttcttgagaaaacaactccagcagatcgctatctcttcaagttcaaccactcggagcttggacattctcttctacccctaccatgcgagaaccagacttcggtgaacacaaggcgcaacatcaatttcatgccatctccctctcccttgaacatagacattggaggagctcgggaagatgaaccagaatatagtccagccgactatgagcaacatgagtactttactcaagctgattatgaggagcaaatcgagtttaagcaacatattgatcaactggagcaagaacaagagcaagctcattatgaagaaggtgttaaccaagagggagatgagatagctgaagttcacaagaagctcggtgtgcttgaagagcttgaaaaccttcacagcaagacaatgaagggtttcaagaagaagatgagaacaatgaagaagtcgttgaagagtatggctgctcaactcaaggatttccagagcaagccaaggccaccgtctcccaaccccgaagtaagaagaagctgttcaacgagctcagctgcaaggaaagttaaaaggatcgatcaaccccgagcttcatctttgagcctcgggaagtgatctccgagttgagagagccaaggagtaggcagagacgagcttccacacgctcgaccggacagaacgagcaacaccctcccgcctcaacttcagcccctgcctatacctaagagagtatggatgactatgtctccatctacttcacctgatcactgaggtaacaccacctcactcattgtacataccattagcatttttatttttcttgtgtgttgtttgttttggtcttgaattctctttcaaatttttattacacaagggactgtgtaatttaagttttggggagggttcaagacatgtttaacattgtgttctcttttcttatttcaaattttgcatcatttaaggcatagaaaaaccataaatatttaaaaaatattcagaaaatgatttcatcaaaaatagagtatcatgtagattgcatatcattttaggattgtatatagtgtgcttgcatttaggattgctcctttgcataggggataatgatgatttcaaagcgataagcatgttttgattcaatgatgtaagttcaatgcccaggttgttggtctctgttgcataaccgattgtatctctgaagtaagactccaccctgcgttgaatttgtaacttgactatactactttgatcgaaactcgcttatctgatgccattccctatctattagaacctgaactgaatttgcaattatcatgtctatgcattgtttgtgaactcatggctaccatatacatacttggatcatcttattcatttcatcaccctctgttaatccaagtagttgtctctcattcttagagcagtttcccatacccttagcctagccttatttcaagccaaagatcatttgtgtgtgattgtgaggtctttttcgattgagcttggtataacatgttaggtatgaggcgacaagagcagtctttcaggtagacctagcccacgccttttgggttagataggactaggtggagacttgtatttgggattgagaatgtgtatggaatgaataggaatgagagtgagaatgagaatgaaaagaaaagaaaaaaaaaaaagagtaagagtttagagttctaagggggatacaaaagtgttaagtctagtaaagggtttggaatttaaagaagttaggcattgtgattcaaagaaaagggtaaatcgccctatgtgctaagattagaagaaaagtcttaagtttgtcaaagtatgaagccaaacctgctagactcttaaaccgtttcaaagggaaccccttagaacttgaaccaaaaagagagaaagaatgagaaaaagggtagagttaggatatctatgggactcggatcatcttctgagctatcatactatatcattgggtatatgggagtctgtacttgtatgtgtccattggcttttacctttagcattctactgaagctcaatcttttctctgagagtcccctgttactcgaccaatcactagagggaccatttttgtctcttagcctaagcccgaaaccaaatgagttcataaccatttcattgcttgatccactgttcgtgtttaatgaatgttaaagggaattggttgatgtgaatgcttgaatagattaaggcaagttgttaggttgcattgtgacgagtatggctaacgtttttaagtaacggtctatcatcttgcaacctagaattagctacctagacattgagcttacccgtcttataggcatgcttcggtttttgaatccccaccttcaaacctttccttcaacttaagactttttgtttgcttgagggcaagtgatattgatcaaattaatcctaagaccactctctcaaataagagatcgattgtagtattttagggtcgaattccacaaaattctcggttcacacaatagattaacagtttcgaataaagctaaacaaaaatataataaaagtaaaagacaagaaagtaataaagagattggttgtagattcagatgattaagatgtcgggtttagggaaattctcaggagataccagaatagtagatctagcacaaaatcactaatagtagatctaacagttccgcaaaactcactatgcttactagtattgatcccaactctcttgtaaatccctagaactaagcaagcattataatcaggtttgataagttcacctaagtaatgcacgctagcacgcatctaaatactaggctcatctaagatagttccagtaataggtacctatggtgggcatacctataaacctaaaatcaagttcttgttaattactctagatctagcataaagaacaatttaagatgaagaattctaaatatattatcgtaacagggttttcgatctactaattcacccaaatccctaatgagaatccctaaacccaacaagagaactactcaagcatgatcatagaagaacaaaacatgattgaataagaaatcaatgatgaaattaagaagagaaaagagtttagaagaatcttctctaaagggagtttccacagggttttgctcccaagaataaaagagattaagagttaggtctaaacaatgacctttaaaaatatatatacatgacctaaaacgtgcagagacttcggattgcttctgcagcttaagttgtctgttttgctccagaatgctctataatctctaaatgcatcccaaacatgtaaagacttgaaaaggactagagaagactctagaaataacaaatagactctaaaacctatacctaaaacatagttaaaaacagtaaaaatagagttatatcgactcccccagacttagcttttgcttgccctcaagcaaaacacaaaagccaaactcgtggaagaggtttgaaaacaaaggaactcccaacattctctaccttattgccttgatcatcctaaccaaatccatatgccttgcagttctaatcaaatcctaaccaacatgtacttctctgcaagcttacaaaacattctagattccatacctaagttccacaactatattcaccaggctttcatcgctgggtctcatcaaacaagctaatattcaagatccttctagactcattcatgtattataccatgataaatcgaccattcttttattattttttatttttttttctttctttggtgttctttctctcccccagacttatgctttttagatagtaaacaaaggagaactcgcatactgggtcgacaccctcgacatttttccaacctttgtaatggatcattccaaataatgtataataatgaggtcataggaaacattcctgcccctatacactatctgaaaatcctgtcaatctcttattattattattttatttattaagggagaggaacactttttctttatcacatgggtctcattatcaggtatgaacaaggagtcaagatctatgaatactaacagtttgaagaggtaaaaggaagagtagtgagattagcttcagccttagtgttgtgttggaaactaggatatcctcaagtctgttggtttgccatctagattttccaatagtcggcttgagtcgaacctgcaccattcatcaaccaggaaataatctaaagaatagagatcataattccgaacaaaatttgactcagtaaaacgactcaaaaagaaaaataagaataagaataagactcaaaaagaaaaacgtagttagtaacagcctcccccagacttaaacgacactgtccccagtggcattcaaatccgaagtaaacgagaaaaataaaagaaaaacgtagaataaaagaaaaggaaaaagaaaatcataccttactagtgggttgcatcccactaagcgtttttttttaatcattagcttgactatgtcaggtttcaggcatcaggtggatcagatggaggcaataaatgcttcttagaagtacatcgcatcatccatggtggtgtatgaacacttagcgcgtgagatcgaccatggaagtgaggcacatcagcaggctgggactcacgtatgggtggtatactcctctttcctacacaatcatcaaaataagaaagaagcactctacgagaaactcgtggcttgcttaaccgtgaagcaagcttggaaaatttaaacgtcttattgatgaaacatgaggtttaagtggaggagatgagtacctttggcgtttaggaggtggattgagtagtagaggtgcattgcttgacttaacaatccgtcctagacttgcagcagcgatttcatccttgagaatcgattctggtgcaggctgttgtgggtgtcgatcgacactagaaggggtatcgatcaacactcgttctctagctcgactatccttagtatgtctacaattcagctctacaatctgttctaagacaaccactgtcttccttttgtcctcctgtttctgtggagtcttgttctgaataatgtcagttacatgtgcagagataatcatcacaccatgctcattattcaaatccttagaaaccatcctcttaacataatgtctgaccgtaggagaagacttcacagcatctataagtggcatctctaaaataagtttatccatcatagctttgcatctagcatcatctagctcctttttggacttcctagagctcttgggaaaaggaaccttgggtgtggttgcctttcatgcggctgaaattgggttttggagaattcgcagggctggactggttggtgtcgatcgacaccctattggtgtcggttgacacagtcgggttctgcagtgtctgcgttggctggtgtcgatcgacacccagcagtgtcggtcgacattggtgtatggtctgcaaaaactgcaacatcattttcttccaaattgacgattttagctgcaggtagctctcgttgaagcattggatttagctgttttccactctttaactcaatagcacgaacatcttctttatccacactaaatcgctttatttgattgttcaatacttgaatcttcccattcacatctttggataaagcatcaagtttgtgatcaaactcttttgtttgcttctcttgacctttgagaatccgtgggagcatagattcaatcgtcctaatggtctcgggtggagggtgggcttgggttgaagaagcataagtcggagtgaaacttgtagattgttgaactggtttctgatgtgtagattgttgattgaagctcatgtatctctattgatccatctttcctgaagtggctaaactgtcaacctgtgcaacatactgaacttgcattttccttgccatgtcaacgcttttggtactaatgctggaagctaaactgtcaatcaacattgttgcatcttctggatatcttgacatgaaattcccattactagctgcatccaaagccatctgataacgccaatcaactcctctgaagaatatacctaacaactgaacctcactaaaaccatgatgcgggcaatctctctgatatcctctgaatttgatccaagcggctttaaatgcttcagctgcttcttgagagaaggtagagatcttcattctcagctcctcggaccttgcatcattataaaagttgttgagaaaaacaacctttatttccttccaagttgttagagatccaggcttcaactgcttaagccaagaagatgcatccccagcaagagaatatggaaagagcttgcaaagaaagtagtcagaagaaacaccttctgccttaatgctcgaaaccaagtcttcaaaccgctcaatatgatctataggatgttcttgtgctagaccatgaaaagggtgaatactcacaagagtaaagaagacaggttgaatctcgaaatcgcttcttgcaaatgaaggtggtcggattgcagaccgattggaatagaagagatccggtctgtatgtggtcaccaagagtcatccgatgaccatctgctctgatttcttcttggtgtcgagcgacacccagctggtgtcgatcgacaccatcggcgatttctggtatcaggtttccatgttcatctattttctgaccctcttcgttgtatgcctgaccagctctatcgcgtaacacaacagccacatcatgtattactatcagcatcttgagttgcgtttgaattccttaaactcctgaaacacaagaagaagaacaaataaaaacgcgtgagtaacaaaagaaaagaaaagcttagactaaattctacaccttatctaatggtgaatcgaagagaacttcggcaacggcgccaaatttgatattggtcaaattaatcctaagaccactctctcaaataagagatcgattgtagtactttatggtcgacttccgcaaagttctcggatcacaccatagattaacagttacgaataaagctaaacagaaatataataaaagtaaaagacaagaaagcaataaagagattgcttgtagattcagatgatgaagatgtcgggtttaggaaaattctcaggaaatatcataatagtagatctagcagtaaattaggattattattgaaccattctagaacacaaataactaatataaagtaaccggtggcattccgcgaaactcactatgcttaatagtattgatcccagctctcttgtaaatccctagaactaagcaagcattataatcatatttgataagttcacctaactaatggacgctagcacgcatctaaatactaggctcatctaagatagttccagtaatagatacctatggtgggcatacctattaacctaaaatcaagttctagttaattactctagatctaccattaagaacaatttaagatgaagaattctaaatatattatcataacagggttttcgatctactaattcatccaaatccctaatgagaatctctaaacccaacaagagaactactcaagcatgatcatagaagaacaaaacatgattgaataagaaatgaatgatgaaattaagaagagaaaagagtttagaagaatcttctctaaagggagtttccacagggttttgctcccacgaataaaagagattaagagttaggtctaaacaatgaccattaaaactatatatacatgacctaaaacgtgcatggacttctttagaaataggagaaagttttgggccaaatttagaaattttcaaaacatcaataagttgcgcaattcaattgccgtcaggtattggtgtcgatcgacaccagggatggtgtccttcgacacctacgtgcattttcgtctctggattgcttctgtagcttaagttgtctgttttgctccagaatgctctataatctccaaatgtatctcaaacatgtaaagacctgaaaaggattagaaaagactttataaataacaaatagactctaaaacctatacctaaaccatagttaaaaacagtaaaaatagggttatatcagcaagcaagagataagtttgggggagttgataacactgtattttactcattttaggtgtatgtttatcatcatttagctttgcatttgctcattgtatcatatcattttgcaccattttagcttgttttgcatacttaggcatctaggatcatcttgcatatgcattgcatgtttcaggtgcagaatgagctaaaaaggactctactcgatccattcaatcgatccaggcagctacagaagaggcatcattctactcgacctctttactcgatccaggatgctacaaaggaggctgcactttattcgaccctcttactcgatcaaggcaaccttagatgaagcattagattgatctactcgcccctcctactcgatccatttactcgaccaagggtgaccatctctacaagacttgttgagctatcaaaccgtcatcggatcctcctcattccccactcaaccagtcatctaagcatacagataggagaggaagaagcatctactagaccaattgatcactcggagcatagacacaaaggcgcagactttgcagcaccctctttactttatccccaagatcgagtattcgcccaaaccgcctcaagtctcttgtcttctagtgaatctacggtttcaacattttactataaatagatcactttggggtttgtccaatctttgtgtttatgaatcttaaaaccttaattactcttaatctattttgtttttgcatttagttgttttagtaaagttgtttagcttgtttagatctacattttggtatgattttagtaatatctgggtttgtgttcttgagaatgttgtttgagtagtgattagggtttttgaggatgaattagattagggtaatctctaagttagttaggtggttagtgtttaagtttatacccttctggattcgcttggcccctatgcggtttccgctggctaatgtggagattcgatcatagacgtccattgtccaaaagacgttcaaatgtatgtctaacctacgaattctagagatttgtagactcgaccaagagattcgcttgtctgcctattggctttggtagattgtttcgtaaaccctgctcttctatgtttcatcaacgagagttgagattaggaagtggtagagttatgggggtctctgtcacgagagtggattgaccctatttttgaatctatcgtcatgggtatttacctttcgcctattagccatctgatgaaccctagagttgcccttatcaatgaatccatccttagaacttctattagatttatttgtatcccttgttgattgcacttttatttacctgttatttgtatcccctatttgtatcccctgttgattgcatttagcttacttaattttgttgccagttggttctactcgacccaatgatcgagtagggctctttaagttctcatttttacttgtttgaatcctgacctaggattgttactagaaacccaccatctttataatctggcttgacttagttgtttctgtacacatctttattgctagcaataacagtggactggattgacaccccttatagttgcatcgacatgtttgtgttttaggggaattgaactgaatcacacattcaccataagcaggtgtgaaaaacctgtttatcagtaaagccctcagaagctccccaatctaggtagcgtcgttcttgatttctcaatctctactagcagatttagccactccttgtgtgatctgggatcaagcatcaacttgatacccaaatttgttgctgagagactaggaatgactagatacaggccaacaaggatcactctcctcttcacggatcgttccaattgaatccccgaaggtatcctcgaggatgttcctatgagagttggtatttgtctcatccctgctgatttcgttgtcctagcatatgatgaggaacccaaggatcctcttatcctcaatagagcattcctagctacatcttgtgctaggattgatgtgaagaagggtaggatctcccttaacatatgccatgtggagatggagtttggcatggatggctcggaattctcattgcctatcagtagcattgccaccaacaaagacaaatctcctaaggctgctcaaattttcaactccagagccaactacaaaggcccttacatcttggctcgcagaagaaagcagtagagagacaatgtcgatcgacaccatacccttgtcgatcgacaccatcgcgcttcattgatagatgattctgcacctccttcacagcccacacatgcttcagttccttttgataggtactcttatatctcttctcctattgttccttcgattatgtatttagaatcttcaaagtgtgcttcaccggtaaacgaggatcgagtttttcgagagcttgtttcctctactgatcttgcgggaaaaggagaaaggatcgatcgacaccaacactagtgtcgctcgacacccaatgctgcacaaagccgatttgtttaaacaacgccttggaaggcgagattgcagcacaagtcctctattcctccatccaagtcctgaactccgcaaagtcaagctattgactctaaacaagcgcttagtgggagacaaccaactagtacgatttttcttttctttttcttttgtttttgactttttaatttatatttcccgctctcttcgaatttgaatgtcactggggacagtgacgtttaagtctagggggcgctcttactaactatgcttttattttttattcttatttttcacttttatagttattgagtcatgtttttcttttctaaaaaaaatgtttttgtttagtttagttaggaattatgatctatatttctttagattactccgtggttgattattgctacaggttcgactcaatccgactattggaaaatccagatagcaaaccgacagacttgaggatatactggtttccaacacaatccattaaggctggagctaatctcattgctcttcctttgacctcatcaaaattgttagtgtttatagaacttgactccttgttcatacctaataattcgactgatgtgaaaaagaataagtattcctctccccttttcaaaaaaaaaagaaaaaaaaaaagagattgttaagattttctttagggtatagggatatgaatgtttctcatgatcccattattatacattttaaggaatgatcagttgcaaatgttggaaatatgcggaggatatctatccgatgaagtgagtactcctttgtttactcttcaaaaagaataagtctaggggagagaaagaatgccaaaaagaataatgaatggttgatttatcatggtatagtacaagaatgagccaagaatgttcttgaatattagcttgtttgatgagactcagcgatgaaagtatggtggatatagttgaaaaacttaggtatgaaatctagaatgttgtgtaagcttgcggagaaatacatgttggttaggatttgattaaacttgctaggcatatggatttggttagaataatcattgcaatagactagagaatgttgggagttcttttgtttttaaaacctcttccacgggtttgacttttgtgtttgcttgagggcaagcaaaaggtaagtctgggagagttgatataatcctagtcttactgttcttagctatgttttagatataggtttttgagtctttttgttatttctagagtccttttagagtcttttcaggtattgtgtggagagggacaagagtggaaataagaagacattttagagcaaaagctgaagaaaataagccaaatgacgaattcagtttcagatcaagtcgagagtgtcgatcgacaacagttgcggcccagaaaagtccatgacggtttagagtttgaagatatggaaatttgccccagaagacttttctattttctttattaatccctaacatttttaggtcttatatatatagttttaaggtcattgtttagacctaagcctttttctaagcctcttgagaaaaagaacttgttctatagcactttcataacctatccattccatgttttaagagtttcatcagagatttcaataacagtgaagagattttttctaactctttctttattgattttgtttatgctttcttattcatacatgttgtttgtttcatccaccatgtctgagtagtttgctagttagggttagggtttctcattagggatttagatgattaagtatatcgcccccttgctacgttacttgtaggattcttcatctttagttgttcttaatgctagttctagagtagctaactagaacttgttctcagataataggtatacccaccataggtatctgttacaagaaatactatttgatgagcctggtttatcggtgtgtactaagaatcggcctatctactaaggtgaacttaatatcagcatgattttttatattataagtaatcatcatatacatagattattttatcttatttctgccattacatttcgcttttaatttataaatggtattctactttatgagatttgtaaaaatacccttttcaatacctttttgtaaaaacaacccttccattgtccatttttataaatatttttttcataaaaaaatgaccaaattatccaccatctaatgaggacatgtaactagaaactgaaattatccttccaaaactttttggcgctcaattattatttcccgaaaaataatttcctaacggtcatccgttaaaacttttcctaccaaaatttgcatttaaaagtttatgtaaattgttaaaacctcttaaaaatttcttataagatttttaaagtcttttaaaagctttgtaaaattgttaaaaacactagtaaatcatttcaaaaaactttaaaatccttataaagtctttaaatacacatgtaattactttaaaacctcttttaaaacctttatcaatatttttaaatcattgtaaattttttaaaaccattttaaagggctttaaactgatttagaagagttttcaaggatttataaggattttaaaaacctttataaatctttttaaaactcttagaaagtctttaagaacattagaccatcattttttaactcttataaaaaaaatttgtaaatatttttaactatttttgaaccattttaaaacacttgtgaacccgtacaaaagattttaaaaacccttataaatcatttaaaattttttttaaaaccctaataaataaacttcccgccaaattttttttttttttgggggaaacggtttttgggaaaaaactttgacgggactttatttcgaaatatttttggcgtgaatatttttggtgggaaatagatttacaaggatttttggcgggaaaacttttgatgggaacttttggcgggaatcaatattttattttttttacctaaaacattttcaaataaggataaaataattattaaaaattaaaaaatggtataaataaaagtgtactacataaaagggtataattaaaaaggggaattcctaatattttcttttctactttcaagtcaagtttacaataatctgtacagtttttaatttgcaaacacactatttataattatgaatacgaaaatgtaatttggttcttttatcctaacacttacttcatctaacgatctttattcttaataaatattgattttaagtttttatattaaataataatcttttaactcatttttactcaaatatggaatattatttccaaacattagtgattaagctaatataatatctgagtataagcctccacatggaaattactaatcggtatttaaatacatatattttttttgtttaaattgaataatttatttaaatctcttcaagcaatatatgtatatatataattcaatttctttataaagaaacaaaaacacgtgtatatattttatactgttttttttttgttacgctacctctcgattaattattctattcaaatttagtgagacaaatattttttgctgtatcccaacaacaaaagttttaattttctagcctcaatttaatgtttgttttaattttctcttttaaaaaacttatcgaatcaagccaaaccaaattaaaatttattagaatatagtatggtaagagacttagagttttattaaaactgaaataacatagtcaaaattaattcaaaatataccaaaacggccacccttaattgtgattaagatgaaaaattattaaatttagtgagactaattatgatatatataattttaattgtgattaagattaaatattgataaagaacctctttagctttttacttctgtctatatgtttttttttcaaaaggttacatttttattgtttgcatatatattgtcttttttatttagtatataacgaataatctaagtcaattatcaaaacctaatgatcgattattttttatatttcaattttaataagaaaaacttatacttcttttgttacttattttggcgatgatttttcttttggtagatatcgtttttccttctttttctgtttttctgttaagttaccttaagaatttatgttaaacatcgacgtggaccaataatatcatgtttttaaaatcctacactaacacctttagaagcttataactttgacttttctatataatagaatagatataaattattaatttaattaaaataaataaataaactgagaaattttccatcaaggtggtgtcgattgacacgttatatgcgagttagtggctaactttaatcgttgagggttcattgagaaagtaggagcggttattgggaacagaagcacgattcacagttcgagttaattgactatagagtgtctagtgttggtgagtagcgtgaccggtgttgtgtacatgtggctggagcaaaatggagtattccaacccatctctcttgttactcagtagctagggatagttagttgtgcaactaagtaacaagctgggatgatgtttggtgatatgaatcaagcggagcatgttcaaaaagagaagtcaggttgtttgtcagattggatgacgagtatgtttgatgaagatggatcagaatttatgtaaggtacgtgatgaggttaagtacattcatattcttgtcgtgttagtacgtaaaatggctagattgggttgttagagcgaatctagctgtttatggcagcttttgtaagaagttgagcagaggtcaataattttatcggtaattatggggtgcccgtgtgattgtgttctggtatgttcggagcgaagacagaaaaatccgcgtcggggtgtcacaacacagaagatcactcaaccctttactcatacttgtattctgaagtctcttatataagaccatatagctactattttcacgacactgaatatttgtaacaagcttttggtacttataagttacaacttagtaacagaatgcgattgaataaaagatgtagctaaagtgttacaacacgtagaaaattagcgacaaattacgagaactgttttttggtaacaaatttgttaccatatgtgttaaagaaattgttgcaacgttccacacaaacaaatccgtcgcagaatttgtaacacccgttgaatagaatattaattaatgttttgcaactattatcagcttctctatttgtagctattagcgacgaattatgtcattatatttttgtagaaattagtatcaaaatcgttgttgtaatttttcacaacttatatttcgtcacaagattttgtaacaaactaagattattagtaatatttaaactttgcaacaatagcttctgtagtaaatagaaacgaagtggagactcataattttgttggtagcaattatgacaaaagttgtgaatgccccatccctgaccaaaagccactcattttgcgatagtgccatagtagcaaatcgattaccaaaagccaatcattgtgcgataatgccataggagcaaatcgattaccaaaagccactcattttgcaatagtgccatagtagcaaatcgataatggagcacagtaataataccaattgttatatgatgtctagtctgtcaccaagttgctatgacaacttgtagctagtgtgtaattttaggcatcgtattatctcttcttcaaatctatataagcctcattctttctttgttttaccaatacaacacaagctagctacaaaaaaaaaaaaaaaaaaaaatcatttcatattcattcaaaaaattttcatttgagttaaccctctctttttccttaaattgtatttattatattcttcttttgtaacaaaaactgtcttccaacaataatatagaaatcttaagaaaaaagatgtataatcgtattaatccacgaactgcacgtgtatccgatgaaaatgaagctgggttaagtcaattcttggagtttgcaaactatcgattatatgatggggatcgaatatggtgtccatgccgaaaatatagaaatggagaacttatttttatagctactgtatataagcatttgtataataaagggtttttatccactattatgtttggacaactcacggtgaggagttcgagcacagacaccaatactatgaggccgaagaaactctagaagataatatatttcaagcaggtgaagcggaataaaattttcaaaatggttatatgggagatactatctcaaccggagatatgtcaataccccaatcaaggtaaattcttacttataaatcttcaaaaaaaataaaatatatatatatatataatagtaaaatttggttaatagaaatattaattcaatataaattaaatagaaatcaatagaaattaataattagaagtggtatactatatataaagaaaatatatatattatataatattttcatatactcgttataaattttctttatcttacctcatacaaaacataaaagtctataaagaaataatagataaatattcaaacgaaaataaagctgagtgatggaataatttggttaattaaaatattaattcagttttgttatataataatatttttgtcatgtaatagaactatatatatttgtgtcatctaagaaagtttcaaatttatttattatcatatcaaatatattagttatggagatatacttgttgaaaatgttataaaattataccttcaattagtattatattaaaaagtttattactttaaatacttacttaaaaatactatttatagattttactgaatttattgtgtctatgttgtacttttctcctccaaaataacatcaagcccattttgtcacatccgcataatcatctcgatatgtgcgtgccaaatgatatgtagtcgatcaaactctataaagccttaaaaactcaacctccatataagctcgagcacattccctaaactttttgcacaaatgcctttgtttactttataaacctttaatttcaagttttgagacaaatggtagatgcaatatccatggtggacaatggatcagatataggctattgcctcaaggagattttggtttctattcgaaaaaaacacaatttcatggtcatctagtataatcgatttgagcttcttgggaaaccaattccaactatcaattttgctcaccatccactacaccaaaagcaatcagataatggtgatgatcgggattttgagccgtagatacaattagaactccgccatatgcagtcttcatatgagttttatccacaatgatgacttttctcataactcggaagccttcaatggaagctctttaagcgaaaaacaattacttaaacttattttcctcatctacttccacataataaactgaatcatgattcatcttttgaatcatgtacatataacaatgcacaaacctaaaacctttctcttgggaacctttaatatcatttgcttcttctctttctcctctccacgcgctataatatatgtgacttgcacaccaaatcttccttgaaccaattcaataagagcttttggattggagtggcaatttatctcggataatcttcaaccaataacgaagtaaccatagtcggtatgcctctctttttaatatcatcgcatccattatgtgcttctgaacctacaaccacatatctcaacggctctgatttattcacaacaaactcaaagacattgttatgtacaaccttttcaactaaactttatattgcatccaaattcttggcctatcataatttcaaacacataatctcataatattggtccacacgcatttcattctaaatatctatcctcattctccaccataacaagatattgttctgatggctctcctacatacatagcaaggacaccaccatcaatctcatccgctccaccaataagagatatatcttcattatttgcaacattttgtctaaccaattcctctcttaatacttgatcaaattgttcattctcatccatcttcaaatttggttcaacatcattgttaactttaacatgcaatacacttctacttcttcactcacatcctcaaaataccactctagatcttcatcatcccgaatataatttggtattcccttacgtccttgaaatgagaagggaaagtaactcactttaggatttgtcgaagtctcatctacatttctcttccttcaaatcttctcaatcaactttgcatatgttacctcttcttttgatttcttcaaaattaatcaaaattaatgaatacactttttcatcttctttggtagaattccaaactacatcttctctaatactattatagtacccaccataagcaaaatgtatgatttagaaattccaaagtaccttccccagttgtcccaattatcttctcaatcgcatggtcccaattatcttctcaaccgcatggtaaacaatgcctttccataccttcatttgtagggaatgaatcctcgtttcatcaatcattggtaatattatcccttttatactctcatgaatctgatccatccatctcctcaagatcttcagtagtaacaacaatcttaggttcatctaaaccacgaagaccaaacttctcctccacatccataatagctttatctatttccaaaccagcaggaccaacctcctcctccacatcactaacatgcacgataaccttagcttcatccaaaccatccacaacaaccttagttgtttccaaaccaccaagactaacctcctcctccacacccttacatgtttccaaaccaccaaaaccaaccttcttctccacatccaaaacagtcttagttgttttcaaaccagtaggacaaaactcatcctccacatccacaacagccttcgctacaaccatatctatttccaaacaacaagggtcggcctcttcctccacatccacaacatccttagcactttccaaaccatcaggactaacctccttctctaaaatagcgttagcttcttccaccacctcatttcctcaccagcttctatagagttgtgaccaaccccgtcctccacaacattagtttttgccacagcctcagcttcctcacccgcttctaaagagttgtcttccaaaaacagctccttgtttttacacaattagcaaacacttttagaacatttttttactggaattttggcatcaaattcacaaatgtagaaccagatttttggttccaagacacctttatccttgtcttcttccttgtttaacctcaaaatttggaggatatgctagcagtttcattatctcctcggggacaaccaattgaaaattatgtggaaccggaaaaatcgtcttcgtatatgcgaaaacccaaagctctacccaataatactttgagcacaaatcatgtaaccgcaactcgggcgttcgtcattgtttgttatagttttagccgctatatcatgcacacatgaatctttgtctatatttaaagaaaaaattgtcatgtggtgtacagcgggtcgatctctagtatggaacatattatgatagcctagtgaaaacattagtgtcatacaattcccaaaactgaataaaaacaattattatttcacagaacaattacttgaaggtaatcttttttcctttttaaaaaaatttatacaattttcaaacttttctatataatacataaccataaaattcgaaaaatcataaattttagtaatcaaatcgtcttatggtgtacggcgtgtcgatatctagtatggaacatgatgtatcatggtttttactgatttgtaacataacgttacaatgatttttagagtctttctagttattttcgtatgcttttgaatctttacaggtgcatatctacttttgagaggtatggagcataataaaaaaatttggaagttttctagcaaagaagaccaacaaatacgttattcacatgttggtgtcgatcgagatcacatcagtatcgatcgacacctttatcgacaaaggaatttcccacgtttcatcaagtcttcaagaattgcataagctccagaaattttctttatttgcaatatagaccctgcacatttttagtaacctattttctttaatgtcattgtttagacctaagcaagttttgtgtgagagatttatactttgggagaaaagattctgaactgttttatatctatcttttatcataattcaatgcaatttagtcacattatgatttgtagttctttaatcatgtctgagtagtcttcttgttgggtttagggtatttcaatagggatttagatggattagtagatcgataacatgtaaggattatttttagagttttcatcttaattgttattactactagttctagattgatcgtctagaacttgatcttaggtaataggtaattccgaaaggcttcttattgttagaactattatagaagagcctaatatttaagatgtgtattaacgttggtctagatacgtaggtgaactaatcaaacctgataataatgcatgtttagaattagggatttgcgggctaacgtcggaatccttagttagtaggcatagtgagtaatgcgggctaacatcggttactctacataagtgattttgagttctagaacggcgtgttaacaatcctaaacataactagatatacagtttgtctaattcctgagattatccctagacctgacgctttagttttctgaatctacaagttgatttagtgtttttttgtctttaatttgacaatatttaggtcttgattggtaacgttaacttcgcgtaattgatttttctttttttgaaaaccgcacttttacaccaatcaagacaaattaataatattttgtgtttttcggaaaaagagggagaaaaaaccccgcaaattttagacatataatggggtggaacgcgtttcaaaatcagacacccttttacatgtggtccaatacaataacgccaatgagttgagtaaatgcatctttatttttttattttttaatgtaagagttttcttatatatacacacatctctccacacatctctctcttccgtataagaaagcaaaaacttctttttcctaaactatcttcacatttctctaactatttctacatttaaggtaagtatttcaagatatctcattaattttttctatttatgctaaattaacatcaccaccatgattctctctcttgttaacttatttatatagtaataattaattacaatattcatgtatttaattaatatctactttaactattatttaataattatactatatctttgtagtttatatttcatcatctctattagatatatacagtatatatatatatatatatatctttatttttaagtttctaataattgaaaagagactatttgattccatatctataaatttgtggttttaatttttttttttttttatagtaataggttattagtttatgtagttacttaataacttaagttagaaagaaagaatgattcgttaattatcatagcaattgttaagataaatatacatcgcggagtttggatgtattagtcaaattaatattattcgctaatttgtaatccatgtaacttggtttgtctaattatacatgtccgttaattatgtaactaatttcaattttgaaatgtttcgtatcatttcttagttatttgatataaaataaagattatatatattaaatatattttgtacttgaatatatatacttgaatttattaataaaatgaaaataaatgatatttgcttatcaaatttgttaaaggaaaattatttcgattttaatgattgcagatatgtcatctaatcgtcgacggaacacaaatccttccacaagaacaggttcaactcatcccgaagtttcagctcttccctcagaaacaacagtgcgggtaaatttacttttaattgtattttctaaaagaaaaatatttactaaaatttgacatagtaaattacactttattcactaaatttgcagaacaaagacaagtacaaatgatcatacattcaagaaaaaaacattaatacaattgttcgacgaagcaattgccatgaataattatactcttaagcatctgacttctatcggtagagagtatatggttgaaaagttcaattaagcgttcgacatgaatataacttatgttttcttcaaaaacaagcttgatgaattcaaaaaaagttacaaaagatggaagtttcttacacataaaactggcatcactgttgatcctgagacatcaatgatatttgcatctgacgtatggtggagagaacaagagtttgtaaatacatctaacttttttactcagaaaaatatcttttaaaattttggtataagaatctaattgattctataattttagggatgtgaattaacaaaaagtttctaccgaaagccgcctgagttttgggacgtgatgaaacgatgtttagtgttagatgatgttcagtcccaaccgcagcattcatctcggcaaagaagagaacaattaatcaacgagcaagcaattgatgaagaaagcgatgatgactcagacgctgatagtggtaatgtgccagcaacacaagttcccgagacacaagaagaagaaaaagtgtatcgtgctgctattgatggtgatgaaacgttccaaaattctgctcctagaaaccaacaacgaattaggcctaatttgcagtcaacaggtagacgtggaagtagttcacaaagatctgggagaagcgcacaaatttctgttggaagtggttcacgaggaaatcgtacacgacaatcttttaaaacaaccatacaagacactattgctggttatagagaatttgccattagtataactaccacatattttcactcaactaattaaacaaaaattaaaaaacattttccaattacaaatagtaaataattaaaaacaaaatttcaacgaaaaacatcataataattatgcaagtaatctttcggaactcatataagtaccttcattttttatatataaacataaaaaattatgtttaaaaagagtttaatatataaactacatttattttttattatcaaatattaccaatacatttataaatgaaattatttctaaaacatataatatcaattaaaattaataaatcaatcaatgtgtggataataataattttaatgcaaaaaatcattggttcaaataatattaaaaatatattacatttcataatacataagcaaatttctgatttcaaataacaatacaataaattttgtaatttactacgataaattttgtgtaataacaatatatcaatcatctcacatccaattgatgttcgccctagccgcttttgctctctggcacaatcaccgagaactcaattttcggcggcgtcggctccggtcgacgtcgcaggaccttttgctcaccatcttcgttgtctcctatgtctcatgatcctgtttttgtttatttctagtctcatcggaattttgccgaaatctcgaatctctgctcccgtcatgcttcagcttcattttcaacatctctatctcctctcttcttatctgatggatcttctcggcgaatttgttttcccaagcttcttctcgcagaggtttatatcggaagaagagtcatctaagtctatttgcgcatcattggaaaaatcagaactttctagctctagatctggaccatcaccaatggcacaaacagtttgtactcaccgaatttcgttgatggcaagagtatctcttggaccgtctgttgcacctattccggtgagttcgtcgacggcgcacgacgtctctcaaagctgtctagttgctccccttgctttcctcaggtctgtgtcgttcatcaacttgccaaattcaattctaaagatgtcctgctcaattatgactggtagtggacgccacgttagggtagtagtgatatctttaggctggatttgtcactatcaatcacgaaacctgttgaatctagaagttttcttgctatccgatgaaaaattatctttgaagcttcttggattaatgctacactcgacccatagcttgcgtgattctggtcaccattttgctcagttgggactcatagttcgagtaacaactttttcaagttcaagcttaatcattccgcctcatacttattgggcgatgcatatcaacactctcgaaccattttggagaaaccgcctcggtatgttcaatctaaccttatctcaagtcctcttaaatcggatattcattgccttggattgaatggacgtggactacactctagcctcgctttactatccttcttttggccttgtgattacttttggcgactcctacaaaccatagagaaaccatccttgcaaaaccatccttgcaaacccttagtctcctttatggagcaccttaacaaaagctctttggcgttattcgcgcgagctctttatgaccacttgttggtcggggatttttcgaagctcgtcttcataattggatccttcaagacatcaaaagatctttcaaacattgcaagcctttcaaagttgtgcatctctttggaaaactctttgagtctctatccttacttatgtattttgtcactttcaagttgtatgaacatgcctcttgtgaggtactaatctaatgaagtgattgtttgcacaataaaaaaaaaataaaaaataaaaaataaaatataaagtatatatatatatatatatatatatatatatcaatcaaaagatcatatgactacttattataagcatgtttatatatatatgtatatattggaacatatacgacaatgattttttcttgtatatgtaacgcacgtaattaaaagaaaatgaagaatcagattatgggttaaattgatcgttttgaaactatctaatttcagggaaatatctgagaaattcaaaagtctggggtagaatctgtaactagataaaagaccggggaccgaaatgcaaagaacgtgaaaagaggtagaaatcgaattgatcctttccaaaaatgaaggagagtttttggcaaattgaatcttcgtttcttaaccctaatatgttgtatatttatgcgttttaaagccccaatgaattagaagccacatccattgtcaatttgaaacttttggttggtggtggcatctattgttggtggtttagtactaagttgttttcagtctccctaagagctttggggagaattaggagttgttctataccttcctagaaagccctcattcatatgaatccatcgctagtgacatctcattaaacgaaagtcggaattgatagaaatctgattggcaagtattttcgattttgttgattcatggtcaaattgggatttttatacaccagttcttaaagtttgaaaccgattttgttatagtatggctatgtagaatactcgattgaaaaaagaattttgaattggctgagttttgaatttaaaccgatagtagtttggaccggttcggctttgtttatatcggttttggaaagtctgatacatgaataagattgaacttgatttaatctttctaatggtatatggtacgtaatttaataatctacggctgaatttaggagaattaattgaggatttggagcgtgggtagaattgctgctaaccgtccgtcaatctgaaaatatttttcaagtgaattctaactcccttattagttattatacatttgtataatattttaggagtatgataaaaagaataaatgaaatatttttatattctgaaaattgatttgcttgctttcataattaatttggttatgattataataataagatatgttattttgttaagaccgatgtacatttgtataatatttgagaataaaatagaaagaacatttggattatttgaacatgtgaattctgaaaattgattatttgatttaatgtgattattctgaatatgattcttatgatgaaatatgttattctcctaagaccggtatcagcatgcgactctgattttgctagctctattgaagaatctgtggcggtcggtatcgccaacaaatgtagtttgtattttgttagtctattagttgtattgaggtcggttaatggtatggaccgtacttccttatcacctcgttaggggccagcatccctatcgagtatattatgtaaatattctgttagtatatggtttgggtcaaccaataccgggattttaccatttcgacatgcattgctagaaacctggtcgttcagttctgatgtattattctgttctgctgtcattattttgctctactgatattattatgttctaatgatttgatcatatatttttatagtataagttatgtgtttactttatctaaaattaattgaattgaaatttatgtctgttagtaacaacacgtaaatattattctgtacgggatcagaccgtgttggtacttgtttgtccggtttgtagtctcattgggcgatttttcgctcagataaattctgattccgtgcagagatcattgaggaggtggagcgtgcatctgaggtttagagtttgtatttttatcgtagagcgagaattggtagattttccaacgtttttgatttgttttgtttcttttttagatctggagtttgtttttttagattttaaactttatacattatgggaatgttggtatttttattatttcattttaattgatgttccgaaaattcttttaaattttttgagcgttacaataaacttattatgaacattcactcgttataattagtcatattaattattattattatttattttctgttgtatgtaaaggataaagttgtatatatacaagaaacaaatatcttattgcatcatttcaagcatattataattttatgaatgagtagtgaaataacatgcccaacataatccttttttttgtcaaccgatggtgatctcattaattgcaaaaaggtacagctgaaatagagtttaatgctgctttggctatagtatctgccgaaacattgctcgctcttttaacataacgaaaacagatctcatcaaaatagagagaaagggtaaggatgtcgtgaagaatccctcggagctcctccggttggggctccccattaagtgctttgaccagctgttgcgagtctgaagctagtgagagttttttgaaaccaaaatccacagcctgatgaattgcaaggaagagcgcagaggcttctgccattagaggtgagcagatcttctttcccgtggcttgtccctgcgattcgaattgagtggagaagttcacaaaagtccagccatatcccgcatctcctgaatccctccaagctgcatctgtaaaacagatcgttgtttcgatgtcaacaggctccacaccaagaggcgaggatagagggcttggcggtaagagtgggtttcggatgggttggatctgagcctcattccattctttagcataggtaattgcttgggtgattaggtctccacttgattgctgctttttctcaaaaatcatcttattcctgcagatccagatcatccatagaatccaggggaaaagaggaccgtggtttagcccgataggcgggagaactttgagatggttagacgcttcaagcccctgcttcaaacttgagattcgggagggagagaggcttatcttgaagggtgtttgaagccaaacttgctgagcgaactgacaatgaaacaacatatggaggcaagtctcttcgtcgccacagtgagggcagaaagcgtcaggattgatccaccgagctctcaaatttgctcccacaggtaatgcatttttcatagctttccagagaaaaaacttgacttttggtgagcaatgtttattccagatttccttgttccagttgaaaacaagaggtgagctaggcaggtgtggcaaagaagttttggatgatgaagctgcatggtagccgctttttgcactgtactctcctgacttagtaagaagccatacatatctatcttttgcaccaaatctactgggtcttagttctaagatttgttgttcatactgtggtaggatctgagagatcttcattctgtcccaagtcttcgaaattggagaaatgagatcctcaactttcatttgctgtgattgctctgtaggaggacccatgggggttgtggaggaggataaagagatccagggatccttccacaccaaagaatctgacccggagccaatagatttgcccagatgggtcttgagtaagtcttttcccacacagattccacgccagcccaacataatcctaaaagttaaaattcattatatatacaagaacataacagtttgaattctcctccgattaaaatgttgtatatataacaatttgaattctcctccgattttagtctctaatctaattattgtttgatctaattatagaaaatcttaataacccgcctaaatcagaatatttcaaaaaaaatcaaaaatattaaatcatttttccagattcaaatatttcatgggtgaaacgtattcttacacgaaataaacgtaaattaaagtaaattgtatacaaacaaatatcagagcccaatatatttacacaataatttctttcaatcattttatctcgtacataatgatatgtctataatttgcatgttttcagtgttcattcatcatcgttttgagtctagtttcatcattcatcactgttttatatcatttctcatcattcttgcaaactttgtatgattaggttagctttgcatacatattgcatttttgagttgttttcaggtgatttagagctgttggcgagcaaactggaagaagcgagccggaactagaggacatactcgaccccaggtcgagtacatccagcaccatactcgacccccaggtcgagtgacattggagccattcttccatctactcgaccccctggtcgagtaacagcagctcaggccactcgatgacatcactcgaccccctggtcgagtatatccttcaccaatcatcgccatcactcgatcaagcactcgaccacatattcagagtcgactcaaatccgcactcaaccagacaagctgagaacaatgaagagaagaggagaagaagaagtgtttggaaacggcctggagctccatcggatcacgaagcccatctcggcccattatcactctatgggtcgggcgattaggttactggcccgtctattatcatttaatttcgttttgtataaataggtgtctgggagttttgtcctgagacatctagtcgacattgattgatcatctttatatttttaatatgtctaatttgaaaaccattttggttttattcgccaactttatgataacgatttttaatttagttttcatataagtataccaagagttattgatatgtaatatatttttcattcaaataattttgagttattactatatgatattgaaagtttttaatcaataattttagtagtaagaaaacaatataacagtgaaaataaccaaaaaataaatttacttttaaaagataatttacacttacaattttgttaagtattatttttggtaaatttgattttagttataagaatataaatcgatccatcggacgggtccttatctagtaaacacataaactgttttcttcaaaagaaaataaagagttttaagcataattataagacataagcagaagtgtaggagaataagaggatcttaggcagcaatggtagagccacaagattgacgtctaagcatccaagtcattctcaaatttgaggtctccaacaacaagaacatctatctgcactctttgttcataaataaatccatcgcaaacatgtaaagatcactacctttctcaacctcttccatggagttcaaacacttcatgcattccctaaccaatgcacttgatggaatcttctccaccacctcgatattgatcctttgacatggcgcaggagttacagttttcacatcttgtgactcttcaacaccaacaccgttaaataccacgtaatgcagagtaggctcaagattgtcatcatcatcagctccaccttcaatccatgtgactagctcgtttaggtctagtgttaatcaaatatattttcctatgaatatttcttcttttttagaagataagaagattaacaaataaaaataataatataagtttaatatatttcatatattattttccaaaaatttacatttctatttttcatatattgtttttttcctttttacaaatatctttgtacataaaataataataaaaattaaaatattaattaatgagatgactaaaatattcaatgtgattgctaactttaattggtcgttttaaatcccatgtagacggccttaaaagctcatcacttcgacttttataattaaagttggaataagaaatttttgtaagactaataatgatgtttttataataaatatcctattttctaaagtaataaaatttacaaataaatttacattttgttattttcatttttatgaatttcataacaaaattatattcagaattatttcatatttttagatttttggtttataaatttaataatctttacaatattaaaactttacatttgattacttttatattacatttttaataacacaacatcatagttagaaatgtatccatatttcaaatatttcttttattgtctttttttttttttaattttttacaaaaaattaagagattatttttagacgtcttacgttttttttttttttacatatgtttttctttaaaaatttacattttttcatatctattggtatttttgctttttaaaagtatcttaattaagtaatttataacttttaaaatgtcagttgatgcaatggctaatccggattggtagttttaaatctcatgacagcctaaggagcttataggctcgacttttaaaccatacataatgaatctatgaaagtaatgattatcgagctaaacgtattttatatatctagatgccttctatgatattgaacttctttctatttaggtcatgaggattactcctttcacgctgcaagtaacaacaaaactcaagaaatcaaagaagtgaagaacaaagagaaaaatgaaatttgtatcataaaactgatcaatgtgtaaatttcacatataaactacaattcaagtaaggaaacgattgttaagcttgcgaaattttaatcaaatccaaaagcagtccatgcaaatcaaagacgaattgtaatggtataacacatttgctaaacacacttgcaaaagctcatcttccatccatggcaagctttccaatgctcatactaaaaaaaattggcattgtatagtcataagtgtaacacccgtaaatagaaaaatcggttagggtttatacttaaatcgtccggtttaatcggttgggttaattggaaatcctagagtgtgcctataaaagaaagaaactcaaaattagggctttagttagccacttttcgttttataaaagagaaaaatagagagaaagagaagaaccagaatcattagggtttgggaggaaacggttgcgacatatcaaatcgttttcaaaggtaacgaaatttagtagagttattcccaagtattttatcgatattctccagtttacagaagtggatttggattataattggttgagttattcgcagtttcgtgagacacgttttctcagacgcgaattaggaccagcaaggattgtaactaacatcgtaatatcatctggtttccgatcggcacgagttttcgtgagaagctttgtaacgtctaaagctagcgtttcaccagagggatttaatagttaacgactggtttgtagtttagggttttgtctttgagactgtttgtttctgtttttcatgtccagtttgcttcaaggttgcttttggttgtgatttattgtaggacgtttctggactgtttcagacgcaagaaatgtctctcctgggtttaattgttgttagaatcaatttgttaaggtgaatgcgtgaccatgagcttatctaagcgatcggattgtgtgatttgttttgtgtgatggtatgtaggtgtggtgaatgtgtttttgggtgaattgtttaatgactggtttgtttatgatgtatttgtgattatacccttttaattgcttttgtgtatagttcgtaaatgggaggatcgcctcactaagtatttgtgataatacttacgcatctctttctttttggtgcaggtaaagataaagtgtgattgtggaatcatggcaaggaagagaggatgatctaggaactcgtttggtttatttttgtgttttggttattggaaccggttagggttgtgttataattgttagttattcttggttttgttggttgaattatttatgtactcataaaatagtatttttgacttgcggtttaaatgttgctttattggttggtttaattaagtatttatgggaatatttaattatgttttttaaaaaaatggtcgggttgtttcaatttggtatcagagcgatcacggttctaggatgtgtagaaaaaattaactgatgaattattttcctgatgattgatgtgagatgagctagggtgttagcatactgaggattgattatggagtgtttagtcaattgtgtgttgttggagtcctagcatcatcttctccgagccttaaatgatattccactgtaagttgtttgtgatatattcgtttattctagtttcttagccttttgttcttgagtagcgcagatggttagaggagctaagttcgtggtcgtggtcgtggtcgcggtagaggacgagtcctcgagggtaccagcgagagtgatggctacagtgctacagttgcgcagagtgtgggttcgcagcctgagtttgtggagcccggggctggggacggtctcgatgccgatatagctggtgcagccggagtggggactggtggagctggtgtcggtgccggtgtgtatgtcgttggtgctgaggacccaggagtgatgggtgccgcagccggaggagcacaggttccagaagttggtttggcgggcctgctgaggcagttgttggagaggttaccaggtgtggtaccagtgcaggctccagttacgccacgagtggcgaaggtgcagcagagggctgcggttgctgaggaggttccatcttatttgaggacaatcgagcagttgtagaggattggcaccgagtatttttctgctggtactagtcctgaggaggctgacagttggcggtcgcaggttgagcggaatttcggttcgaacagatgtccgatggagtatcgggtggatttggcagtgcattttagagggagatgcatatctatggtggcggagtgtgactgccaggaggaggcaggcggatatgtcttgggaagatttcgtgactgagtttaatgccaattactttcctcaggaggcgctcgaccgtatggagacgcgttttcttgagttgacaaagggtgagcggtcggttcgagagtatgatcgaaagtttaaccgactcttggtgtctgcgggtcggggcatgaaagatgactaggcccagatgatgaagttcttgaggggacttcgaccagatttgagggtgcggtgtagagtatcgcaatacaccacgaaagcagcactggtggagacggctgctgaggtagaggaggaccttcagaggcaggtggtggcagtgattcccgcggtacagccgaagaagactcaacatcaggtggcacctagcaagggcggcaagcctgcgtaggggcagaagaggaggtgagatcatccttccagagccggacagggtggtcgtgcaggatgtttttcttgtgggagccttgaccacaaggtagcggattgcacgcagcgagctgagacgagggagtgctaccactacagggagagaggacatctcatgccgaattatcctaagttgcagcggatggcagtggcgagagtacagccggcagggagcgcaggtgcaacagggagtgcagcaaaatgtgcagcagttagcacatattgcagcggcaccgcaaggttacactacgcgtgagataggcggtaccagcaatagagcgatcactgttatgatttctaagactcagactttgtgaattatttctgttgtttttggatatcattgttttgtgatgaatgttagggttcttaacacatgaggtttgtgtagggaccttattactgggcggtgtagaggcccatgtgttgtttgactctggagcatcgcattgcttcattaccctggagagtgcctcgcgcggcaacatccgtggggatcctggtgagcagtttggagccgtcaaggttgctggagggcagtttctagcggttctggggtgagctaagggtgtggatattcaaattgcaggggagtcgatgccgacagatttgattagcagtattgtaaagttgtatgatgttattgtgggaatggattggttggatcattacagagtacatcttaactggcaccgtgggagagtttcttttgagcggccagaggggaggttggtttattagggaataagacatacctcagggagtctcgtcatctcagcagtgcaggcagagaaaatgatcgagaagggctgcaaggcttacctggtgatgatatctatgccggagtctgtggggcatgtagcagtgagcgacattcgggttgttcaggagttcgaggatgtgtttcaatcgttgtagggattaccaccatcacggtctgatcctttcacgattgaattggaactagggacagcgccgttgtctaaggcaccctacaggatggctccagtgttgagcctgaaggagatgttgacgagtacaccagtgttagcattgctagagcatggaaagccttacatagtgtatactgatgcctcgagagttggtttgggttgtgttttgatgcagcgtgggaaggttattacctatgcattgcggcagttgaggaagcatgaggacaactatcctactcacgatttggagatggttgcagtaatctttgccttgaagatttggagttttatctttatggcgggaaaatgcaggtgttcacggatcataagagtctaaagtatatcttcacttatccagagctgaacctgaggtagaagcgatagatggagctggtggctgattatgatctagagatagcctagcatcctcgtaaggctaatgtggttgcagacgcgttgagccgtaagcgcgtgggtgtggcaccagggcagagtgttgaggccttggtgaatgagattggtgctttgcagttgtgtgttgtggtaggggagccattgggattcgaagctgtggatcgagcagatcttctgagtagaatgcggttggctcaggagaaggatgaggggttgattgcggcttctaaggcagagggctctaagtatcagtttgcagctaatgggactatccttgtgcatgggcgagtttgtgtgcctaaggatgaggagttgagacgcgagatcttgagtgaggctcatgcaagcatgttttccattcatccaggagcgactaagatgtaccgagacctcaagcggtactatcagtgggtcgagatgaagagggatgtagctaattgggtcgtagagtgcgatgtttgccagttagttaaggctgagcatcagatgccgggtgagtttacccatccctgagtggaagtgggattttatcacgatggattttgtggttgggttgcctgtgtctcgaaccaaagatgctatttgggtgatcgttgaccgtctgactaagtcagcttattttctggccatcagaaaaatagatggagcggctgaattggctaagaaatatgtgagcgagatcgtgaagttgcatggagtacatgtgagtattgtgttagacatggactctaagtttacatttgggttttggagagccttcaggcagagatgggcactaaggtgcagatgagcacgacttatcatcctcagacagatgggcaatctaagaggactatccagacgcttgaggatatgttgcggatgtgtgtcttggattggggaggtcattggacggatcacttgagtctggtagagtttgcttataacaacagctatcacgcgagtattggtatggctcctttcgaggcgttatatgggaggccatgcaggacaccgttatgctggacccaagtgggggagaggagcatatatggtgcagattatgttcaggagaccacagagaggatccaggttcttaagctgaacatgaaggaagctcaggatcgacagtggagttatgctgacaagaggaggagagaccttgagtttgaggttggggacaaagtgtatctcaagatggccatgttgcgaggtccaaacaggtctatctcagagactaagttgagtctgaggtacatgggtcgttcaggattgttgagagggtgggaccagtggcatacaggttagagttgccagatgttatgcgtgcgtttcacaaggtctttcatgtgtcgattctgaggaagtgtcttcacaaggatgatgaggtgttggctaagattttagaggatcttcagcccaacatgactttgaaggcgagaccagtgagggttctcgagaagaggatcaaggaacttcggcggaagaagattcctttgatcaaagtcctgtgggactgcgatggtgtgacagaggagacttgggagccagaggcgaggatgaaggcaaggttcaagaagtggttcgagaagcaggttactgcatgaatttgcctttccttggtttccagtttcagtgttgttgagtttttgagcttttgagttgttgttcttatttctctttcatttttattttcgtttggagttgtaacgatcatgacatttgatgatttataagatgagtatttgttttcttagatttgacttgagttgtcttatttaagaatgtgttgtgcggtttccaagaatggaaagttttccataaaggacttgtctatttttggaaaggttaagtaaataacctaagaaataggtgtgtttacgagatagccgagaattggtcataagagtgttcccgaggggatatgatggatggtgaggtataaaggtgtcctacgcaaatccatgagagagtctgaagatatgctcggaagcgtttagaattgtttgctcgagggacatgagggtcccaacgactcgtgaggagcgggatatgctcctgaggtaccggtaactcgaggggcttggtgtctttagagtcagtggcggatctagaacgttattctactcgggcaccactaattatttacaaataatgtataaattgttgtcaaaaacaaaaatgtataaataaaatatgtaatataatacggctaaaaatgttacatatgctaatttttttgtaaattttgtattgattttgaagtttattgtgatgggataaatttttatgctaaactattttatataaatttttacttataagttataaccattaagaaaaggaaagtgaaagaaacttagggaatcaaatatacaattagtattgatggtgggatattggattatagaaaatgaaataaaaagtgttgttgaggggaaagaaacctaaattgcaaagtaaaaagtgttaattaccataaataaaacaaaggaataataagaaagagataataaacgaatcaaaagtctatttagcctagggcactattgaaaatttgtctgattttaccatgattcaataaaataattataactataagcataaaattttcaagagtagtgtagggcacgtgcccatatagccttgcacatagatccgcccctgtttatagtgcaaggggtacgatggcttcgggtgacgatccgagagcacggtttagcgtgatgactcgagagcgagttttgaggtattattttctccaagtgtcgtaactcggtgactttgtagctgagagtgagccgacacaactctgggtttgactttgagtagggaagataatacgtgtgatacccgagataccgtaggccgatgcttgaaagtgacggtttatgctcgaagattgcgatctgagagtggagagtgagttgtgaacaacaatgactagtaaatcgtgagtatatcgactggatagagagacctagagggggtctggttggagggagtgcggaccgtagtgatggttgcacggagttccccggagtggaagggtgaagctagattcgaggacgaatctatgttagtgggggagaattgtaacgcccgtaaatcgaaaaatcggttagaatttgtatttaaatcgtccggtttaatcgattgggttaattggaaactctagagtgtgcctttaaaagaagaaaactcgaaattaaggctttagatagccacttttcgttttataaaggagaaaaagagagagaaagagaagaccaaaatcattagggtttgggaagaaacggtttcgacatatcatatcgttgtcaaaggtaacgaaatttggtagaggaatttccaagtcttttatcgttattctccagtttacataagtggatttggattaaaattggttgagttattcgcagtttcatgagatacgttttctcagacgcgaattaggaccagcggagattgtaactgagatcgtagtctcatctggtttccgattggcacgagtttttgtgggaagctttgtgacgtgtaaggctagcgtttcaccggagggatttaattgttaacagttggtttgtattttagggtttcgtctttgagactgtttgtttctgtttttcatgtccagtttgcttcaaggttgcttttggttgtgacttgttgtaggacgtttctggactgtttcagacgtaaggagagtctctcctgggtttaattgttgttagaatcaatttgttaaggtgagtgtgtgaccatgagcttatccgagcgattgggttgtatgatttattttgtgtgatggtatgtaggtgtggtgaatgtgttttttggtgaattgttaaatgactgatttgtttatgatgtatttgtgattatacacttttaattgcttgtgtatatagttcgtagatgggaggatcgtttcactaagtatttgtgataatacttacgcatttctttctttttggtgcaggtaaagataaagtgtgatctaggaactcgtttggtttatatttgtgttttggttattggaaccggttaggattgtgttaggattgttagtcgttcttggttttgttggttaaattatttatttattcataaaatagtatttttaacttgcggtttaaatgttgctctattggttggtttaattaagtatttatgggaatatttaattatgtttttttttaaaaaagggtggggttgtttcaataagaaacactctattttacaatttcatcacgatagacatacctttacaatctagacatcgttctccatttagagagccaccagagacgataatgactttggagcgagcggacttcagttttttttcctgagcttcataacagatttgtgtgttttagaaagtaagtatacgttagggtttctactttctagcagtaaaaaaaagggatgtaaattcatgacaaaatacaaaacatagtttagattagagactgactttttgtacgatgaaacaaacacactttgatgattgtatgtccacatcatcgtaacctgagaggtaaaaaatcatattaaaaatcaaaaatatatgcaggaaaaaacatgaatgaagtgacaactaaagaacgatcggaatggagatccctaggcatattatttataatgtgagatctaggtctaaccgaacaatttttttatttctatatatatattaattttttcctttatacaaaaaaaaacttaatatggaagactaaaataactttaaaaatggcaacaaatgatatggctaatctcgattggttgataagcaaaaccttgaggcccataagtaagtcacctttcttggggtttcttgcttcccataagtggaagacgctaacaacaacatctttcctaataaaacctttttgacaactaatcaaaaaccaaagagggaagtagttgaccggaaggagaagaagttgcatgtcacatcttaattcaataaattgttctctcaatgaactaaaactctctttgatctcttaatgaacttaaaacgttaattgaagtttctatgtttaatcatcagttttatatgagtatttttacatcaaccactactttagaaattagaaacttttatattttccattttaccgattagtagaatttctctttcttgttgaagaaagtttcttgactttaattgtatttttttctcattttaataggtttttccttatcatttaaactaaagctaagattaacatattttcaagtttttatgaatttttctatcaaacatctttgaatgattttcatatatgatttagcatttaattgttttggaaacttaacatatattcggttgtttaaaataagaaactcggttgttattttcatttttttttaaatagaaggtaattactattttcaataatgtcacttaattagatgttaaatatgttaattattgatgtggcagctctcgattgttcgttctaaatcctacatagacgcctttacaagcaaataacttcaacttttatatagtatagactaggttttgacccacgctacgagtgagtttttatctaaatattttcttataaaaaatatgcaattagtttttacataagtgatctataaatctgaattttttgtaatatatcagttatgaagttaatatatatcaatgtaattataatgactttaactccatgatgattttaaattaccatatgtcaaaaacttgaatgaaaattcaaaactaaaaaagttatagcagtttagatctataaaaatgaatttattaccaaggtgaataatttttatatgatagaaatgtgtgtctttttaatgtttttactattatcaatgtgtgagtgtttaaattatattttttgtaatatgtatagtaaaattttaggatattaacaaatatttgtgtttgacctatttgttactcaaagattgttgtccttaatttgtttaatattgtaaatatgtaacgtgaaaatttttcagaatagaataacgtgatcagagcgaagaatctgaaaaaaaattgtatatacttttttcaaacgctacacttacttaaacccaaagagtgaaagaactgaataacaaaatttagtgttaagatagggatttctagttaaaagagaaatagattggttatctgatgattatgattatgatgattgatgagcataaaagtataaacacacaatacatattccgtctttggaaagaactattttaaagaaacacttacggtcttaaaacaataaagttattttcagtctcttcaatcctattttaaatttctatatatacaattgttgatactaatctggttaagtttattgtcatcctaaatccgccaagatatcatcatattgttggtaatgaccatattatcaagaagaaactcatacgactatagatagttcttgagccgtagatgaaagattttcagaatctcatcgcaccatctcaaaagatttacccgcaatcctcaaaatctgatctaaaactgccctttgataagcctcttcgtaaaacgggttttctcctttcttaaacctcctaccaacctaaccacaactcaagcgcggctacatgaattcaaactcatccctatacactacaaacacaagaggctttggcaaccctgtaaatgccgagtttaatttgagaatcaaaaataagtaacgcaaggatactcaagctcaagctcaaactcgttacttaaaaattcgcatcaaaactcgtctaggatacttacgaacactccatccatggactttacataaaaccttcatcgaagcattatcattataataatgaggaatatcattgaatggttttagtggtgttcctttgggggtgataatatttgttaaactattataaacattgtaacgtctatcattattagagcttcttctttcaaaaatcaattgtctcatcccataagataacaccagttttgtgaaaacattccgcaagcatataagttgatgtgtcatagtaattacttaataagctctttgttagaactttcaataataatttttttgattattaatggtctatagatgattatttatatacataaaccactactttagaatctagaaactttcttatttgacatgatttgttaaaaagaaattttcctttacgttattaatattttctttttcgtttaaacttttcactttctctaattatgaaaattttctttttattatttctatatgttgttttcaaaagtttacatatttgttctttacaaatacaaaaaaaatctttttcgtaaacatcttaatatagaaagtaattataattttaaaaatgtcaatttgcaaagtttgtaaatatgctaattgatgacatggctaatctcgattggtggtttttaatcctatgtggaaacctttagaagcaaatagcctcaacttttatatagtatagattacaaacatgtaacgtctattattactcgagctcattctttcaaagatcaagtgtctcatcacataaggtaacaccagttttgtgaaaacaattccttaagcttacaagttgtaagtgtcatagtaacttaataagctctttgttaggactttcaataataatttttttgattataaatggtctatagatggttatttatacataaaccactatagaaagcaattataattttaaaaatgttaattttaaaaactaataaggatttttaaatgtaaatttagcttggaattgttttggcgggaaaaacattttggtgcggaaaaaaaatggcaccaaaaatttcagtttctaatttcatgttctcattagatgatgggtaatttggtcattttattcaagaaaagctgtatttttaaaattggccgacaggatacaatattgttgcaaagaggcaatagaaaaagtgtatttttgcaaatctccttaattatatttctccactccattttattcaacacacaataaactaaaaattaactcccacaatttctttcaaattgtaattcatcacttctcatccaataaatatatattctctcattcactcattctctcatcgccttccacaatatctcaactctcaaatatttttttgtttagttttaagtttttttggttgttgttatgagttaaaaaaaatatcattttaaaatcttagttcaaaattttaattttagacaatgaaccttacattgttttttctttgtttttaagaaatatatatatatccattatctatttttattaccatcttataaataatcattctatcatcctattccactatattcatgtatatatatatatatatatatatatatatatatatcttatgttgttatatgggtaaaacacaataaattaaagattaactcccacaatcttctggaataggatgatatacacaataaatttaaaaagttttaataaaattttgaatgaataaaatatttattgaaaattttgagatatatgttttatatgtctattaatagttaataatttaaattccttgaattttataatattaccatgacaaatagtttaatttaaatacataaataaaaaataactctaatacaacttttaggtttcacaacatttatcaaaagaatagtttttttgtttataactctctctgtagttttagatattttggatgactgcgcatttttacgtaagacgttttgattgaatctcatgaaataaattattgtatggagaataactttaacgactttctcattttggtatccgcaaattcattattgtttttcttttatctttgcttcattagttagtatagctcttctaaaaaaagattctatacaaaattatattcataagcttatctatacttttttttaacaactaatatttttctcacattcttttcaatatgtatatgaatttttgtcttcacaatttttctcagagagctatcactctctctatctttttgcaagcactcgttttatttgtttcgttctttcttacagtttctttttacatcatcttatgatttagtctaagcaatatgtgccctacattccaaaattttctcatactccatatttcttctttaaaaatctcttcctttccttgttagtataaaccgttttcaagctcgtcgagaggtaactaagttaagtcaatcaacatttcgtttgaatttttgagaaaaaaacttcttttgctctattttgtgttctattatgctaagaaaatgttttagcttctaaattggttcttaactctatcacgtctcttttttttatgcagtttagatcctcttcaccttcacgcttcccaaagtgaaagacatcaacttatatctttgggaacttgattcaaattgatacgattaagaacaccacgatcaaaccatgtctttgttgctttaacgcttcacaaaccaaacataccttaatccctattcacttcaccttcttgtgaaataatctttcacatacttctttcgtactgtatctctttccatcttcttatgattttgtctaagctgtatttgtcctacttttcaagcttttcacatgctccatagttcttctttgaatatcccttcatttccttgttagtaagaacctttttcaaactcgtcgagaggtagttgagtcaagtcaataaactcttcttttgaactttcaagaataaaatctttgtttttctctgttttgttttctgttattctaataaaaggttttagcttctaaatttggttttaactctatcactttctctcttttgaagttgttgtttaaatcctcttcaccttcacgcttcacagactgaaatacctcaacttatatattttagaacttgattcaaattgatacgattaggaacaccaccatcaaaccatgtccttctaaactttaacgcttcacggaccaaaaacaccttaatctctcttcaattcacctacttgtgaaaaaatctttcacatacgtttttcctatggtatctatttacatcctcttatgatttgttacagcagtatatgtcctacattccaaacttttcacatacttcatatatcttctttaaaaattcctttcttttcttattaataaaagcctttttcaagctcgtcgagaggaactttaattaagtaaataaattatttgtttaaacttaccaaaataaaatttttaatcgactatcaatggtccagatgtttatttatatagacacagtgagactaacaatcccattaatatttctatattatagtaattgaattaaacattttcttatttctatatctctttttcattttcataattattttaatatagaaatttgttaaaattttaaaacgtaattttttttttttgttaaattaacatatgtttttctttttgataaaaaattaacataatgactaaaaatgctaattaatgacatgtttaatcgcaattcgttcttctaaatcctatatcgatgtctttaaaaactaatagcctcaacttttctatagtatagattatttttatacttttattttaaactaaaagtttcttcgaccatcattaacttatttttttttgtgttgttagttgaatattttttttattttgtgatctaatcaaatcaaatttaactcaaaatcaaacgaaaatgtcaaccctaattatttttccatatgttatttttataaggtttatatttctctttttctatatattgtttttttccttttcataaatatcttaacatagaaaattataagaatttaaaaatataaactaacataatgctaaaaatgttaattagcatatgcataatcgtgattggtttctactaacaaaaatttactttcttttcttttctttttgttattttctaaaaaaatttccatttctctttttctatatattgcttttttccttttcataaatatcttcatattgaaaattatcataatttaaaaatgtaaattaacgtaatggcttaaaatattaattagcgagatggttgtttaaaatcttatgtggacggcttaagaagcaaatagcctccacttttctatagtatatattatatagagtacggttttgaaagttagtaacttacgagatcatgacacatcttaatttcatcgatattagattttaaatgtcttctcaaatcttatgttattgaacatggaacttacttaatatcattcaacataacttctaatcacatgttattcaatcaataattaataaaagttttaccaaatcctatgttattcaaaaatttgctataatcttgtgatttggttttataacggatttttggagactttagacataattttagttaaaaaaaaaatatagatccataaatctaatcctcaactatgatactttgagagatttcaatcaaaatttaaaatataacgttacccacataaacttgtataaaccttcgtttattgaaatcttaagataatggcaaattctccaccattgtcagatttgttctgtaatcttccataatatattagt

SEQ ID NO: 1478 - DNA, 114056 bp, Arabidopsis thaliana
aagctttgtaacgtctaaagctagcgtttcaccagagggatttaatagttaacgactggtttgtagtttagggttttgtctttgagactgtttgtttctgtttttcatgtccagtttgcttcaaggttgcttttggttgtgatttattgtaggacgtttctggactgtttcagacgcaagaaatgtctctcctgggtttaattgttgttagaatcaatttgttaaggtgaatgcgtgaccatgagcttatctaagcgatcggattgtgtgatttgttttgtgtgatggtatgtaggtgtggtgaatgtgtttttgggtgaattgtttaatgactggtttgtttatgatgtatttgtgattatacccttttaattgcttttgtgtatagttcgtaaatgggaggatcgcctcactaagtatttgtgataatacttacgcatctctttctttttggtgcaggtaaagataaagtgtgattgtggaatcatggcaaggaagagaggatgatctaggaactcgtttggtttatttttgtgttttggttattggaaccggttagggttgtgttataattgttagttattcttggttttgttggttgaattatttatgtactcataaaatagtatttttgacttgcggtttaaatgttgctttattggttggtttaattaagtatttatgggaatatttaattatgttttttaaaaaaatggtcgggttgtttcaatttggtatcagagcgatcacggttctaggatgtgtagaaaaaattaactgatgaattattttcctgatgattgatgtgagatgagctagggtgttagcatactgaggattgattatggagtgtttagtcaattgtgtgttgttggagtcctagcatcatcttctccgagccttaaatgatattccactgtaagttgtttgtgatatattcgtttattctagtttcttagccttttgttcttgagtagcgcagatggttagaggagctaagttcgtggtcgtggtcgtggtcgcggtagaggacgagtcctcgagggtaccagcgagagtgatggctacagtgctacagttgcgcagagtgtgggttcgcagcctgagtttgtggagcccggggctggggacggtctcgatgccgatatagctggtgcagccggagtggggactggtggagctggtgtcggtgccggtgtgtatgtcgttggtgctgaggacccaggagtgatgggtgccgcagccggaggagcacaggttccagaagttggtttggcgggcctgctgaggcagttgttggagaggttaccaggtgtggtaccagtgcaggctccagttacgccacgagtggcgaaggtgcagcagagggctgcggttgctgaggaggttccatcttatttgaggacaatcgagcagttgtagaggattggcaccgagtatttttctgctggtactagtcctgaggaggctgacagttggcggtcgcaggttgagcggaatttcggttcgaacagatgtccgatggagtatcgggtggatttggcagtgcattttagagggagatgcatatctatggtggcggagtgtgactgccaggaggaggcaggcggatatgtcttgggaagatttcgtgactgagtttaatgccaattactttcctcaggaggcgctcgaccgtatggagacgcgttttcttgagttgacaaagggtgagcggtcggttcgagagtatgatcgaaagtttaaccgactcttggtgtctgcgggtcggggcatgaaagatgactaggcccagatgatgaagttcttgaggggacttcgaccagatttgagggtgcggtgtagagtatcgcaatacaccacgaaagcagcactggtggagacggctgctgaggtagaggaggaccttcagaggcaggtggtggcagtgattcccgcggtacagccgaagaagactcaacatcaggtggcacctagcaagggcggcaagcctgcgtaggggcagaagaggaggtgagatcatccttccagagccggacagggtggtcgtgcaggatgtttttcttgtgggagccttgaccacaaggtagcggattgcacgcagcgagctgagacgagggagtgctaccactacagggagagaggacatctcatgccgaattatcctaagttgcagcggatggcagtggcgagagtacagccggcagggagcgcaggtgcaacagggagtgcagcaaaatgtgcagcagttagcacatattgcagcggcaccgcaaggttacactacgcgtgagataggcggtaccagcaatagagcgatcactgttatgatttctaagactcagactttgtgaattatttctgttgtttttggatatcattgttttgtgatgaatgttagggttcttaacacatgaggtttgtgtagggaccttattactgggcggtgtagaggcccatgtgttgtttgactctggagcatcgcattgcttcattaccctggagagtgcctcgcgcggcaacatccgtggggatcctggtgagcagtttggagccgtcaaggttgctggagggcagtttctagcggttctggggtgagctaagggtgtggatattcaaattgcaggggagtcgatgccgacagatttgattagcagtattgtaaagttgtatgatgttattgtgggaatggattggttggatcattacagagtacatcttaactggcaccgtgggagagtttcttttgagcggccagaggggaggttggtttattagggaataagacatacctcagggagtctcgtcatctcagcagtgcaggcagagaaaatgatcgagaagggctgcaaggcttacctggtgatgatatctatgccggagtctgtggggcatgtagcagtgagcgacattcgggttgttcaggagttcgaggatgtgtttcaatcgttgtagggattaccaccatcacggtctgatcctttcacgattgaattggaactagggacagcgccgttgtctaaggcaccctacaggatggctccagtgttgagcctgaaggagatgttgacgagtacaccagtgttagcattgctagagcatggaaagccttacatagtgtatactgatgcctcgagagttggtttgggttgtgttttgatgcagcgtgggaaggttattacctatgcattgcggcagttgaggaagcatgaggacaactatcctactcacgatttggagatggttgcagtaatctttgccttgaagatttggagttttatctttatggcgggaaaatgcaggtgttcacggatcataagagtctaaagtatatcttcacttatccagagctgaacctgaggtagaagcgatagatggagctggtggctgattatgatctagagatagcctagcatcctcgtaaggctaatgtggttgcagacgcgttgagccgtaagcgcgtgggtgtggcaccagggcagagtgttgaggccttggtgaatgagattggtgctttgcagttgtgtgttgtggtaggggagccattgggattcgaagctgtggatcgagcagatcttctgagtagaatgcggttggctcaggagaaggatgaggggttgattgcggcttctaaggcagagggctctaagtatcagtttgcagctaatgggactatccttgtgcatgggcgagtttgtgtgcctaaggatgaggagttgagacgcgagatcttgagtgaggctcatgcaagcatgttttccattcatccaggagcgactaagatgtaccgagacctcaagcggtactatcagtgggtcgagatgaagagggatgtagctaattgggtcgtagagtgcgatgtttgccagttagttaaggctgagcatcagatgccgggtgagtttacccatccctgagtggaagtgggattttatcacgatggattttgtggttgggttgcctgtgtctcgaaccaaagatgctatttgggtgatcgttgaccgtctgactaagtcagcttattttctggccatcagaaaaatagatggagcggctgaattggctaagaaatatgtgagcgagatcgtgaagttgcatggagtacatgtgagtattgtgttagacatggactctaagtttacatttgggttttggagagccttcaggcagagatgggcactaaggtgcagatgagcacgacttatcatcctcagacagatgggcaatctaagaggactatccagacgcttgaggatatgttgcggatgtgtgtcttggattggggaggtcattggacggatcacttgagtctggtagagtttgcttataacaacagctatcacgcgagtattggtatggctcctttcgaggcgttatatgggaggccatgcaggacaccgttatgctggacccaagtgggggagaggagcatatatggtgcagattatgttcaggagaccacagagaggatccaggttcttaagctgaacatgaaggaagctcaggatcgacagtggagttatgctgacaagaggaggagagaccttgagtttgaggttggggacaaagtgtatctcaagatggccatgttgcgaggtccaaacaggtctatctcagagactaagttgagtctgaggtacatgggtcgttcaggattgttgagagggtgggaccagtggcatacaggttagagttgccagatgttatgcgtgcgtttcacaaggtctttcatgtgtcgattctgaggaagtgtcttcacaaggatgatgaggtgttggctaagattttagaggatcttcagcccaacatgactttgaaggcgagaccagtgagggttctcgagaagaggatcaaggaacttcggcggaagaagattcctttgatcaaagtcctgtgggactgcgatggtgtgacagaggagacttgggagccagaggcgaggatgaaggcaaggttcaagaagtggttcgagaagcaggttactgcatgaatttgcctttccttggtttccagtttcagtgttgttgagtttttgagcttttgagttgttgttcttatttctctttcatttttattttcgtttggagttgtaacgatcatgacatttgatgatttataagatgagtatttgttttcttagatttgacttgagttgtcttatttaagaatgtgttgtgcggtttccaagaatggaaagttttccataaaggacttgtctatttttggaaaggttaagtaaataacctaagaaataggtgtgtttacgagatagccgagaattggtcataagagtgttcccgaggggatatgatggatggtgaggtataaaggtgtcctacgcaaatccatgagagagtctgaagatatgctcggaagcgtttagaattgtttgctcgagggacatgagggtcccaacgactcgtgaggagcgggatatgctcctgaggtaccggtaactcgaggggcttggtgtctttagagtcagtggcggatctagaacgttattctactcgggcaccactaattatttacaaataatgtataaattgttgtcaaaaacaaaaatgtataaataaaatatgtaatataatacggctaaaaatgttacatatgctaatttttttgtaaattttgtattgattttgaagtttattgtgatgggataaatttttatgctaaactattttatataaatttttacttataagttataaccattaagaaaaggaaagtgaaagaaacttagggaatcaaatatacaattagtattgatggtgggatattggattatagaaaatgaaataaaaagtgttgttgaggggaaagaaacctaaattgcaaagtaaaaagtgttaattaccataaataaaacaaaggaataataagaaagagataataaacgaatcaaaagtctatttagcctagggcactattgaaaatttgtctgattttaccatgattcaataaaataattataactataagcataaaattttcaagagtagtgtagggcacgtgcccatatagccttgcacatagatccgcccctgtttatagtgcaaggggtacgatggcttcgggtgacgatccgagagcacggtttagcgtgatgactcgagagcgagttttgaggtattattttctccaagtgtcgtaactcggtgactttgtagctgagagtgagccgacacaactctgggtttgactttgagtagggaagataatacgtgtgatacccgagataccgtaggccgatgcttgaaagtgacggtttatgctcgaagattgcgatctgagagtggagagtgagttgtgaacaacaatgactagtaaatcgtgagtatatcgactggatagagagacctagagggggtctggttggagggagtgcggaccgtagtgatggttgcacggagttccccggagtggaagggtgaagctagattcgaggacgaatctatgttagtgggggagaattgtaacgcccgtaaatcgaaaaatcggttagaatttgtatttaaatcgtccggtttaatcgattgggttaattggaaactctagagtgtgcctttaaaagaagaaaactcgaaattaaggctttagatagccacttttcgttttataaaggagaaaaagagagagaaagagaagaccaaaatcattagggtttgggaagaaacggtttcgacatatcatatcgttgtcaaaggtaacgaaatttggtagaggaatttccaagtcttttatcgttattctccagtttacataagtggatttggattaaaattggttgagttattcgcagtttcatgagatacgttttctcagacgcgaattaggaccagcggagattgtaactgagatcgtagtctcatctggtttccgattggcacgagtttttgtgggaagctttgtgacgtgtaaggctagcgtttcaccggagggatttaattgttaacagttggtttgtattttagggtttcgtctttgagactgtttgtttctgtttttcatgtccagtttgcttcaaggttgcttttggttgtgacttgttgtaggacgtttctggactgtttcagacgtaaggagagtctctcctgggtttaattgttgttagaatcaatttgttaaggtgagtgtgtgaccatgagcttatccgagcgattgggttgtatgatttattttgtgtgatggtatgtaggtgtggtgaatgtgttttttggtgaattgttaaatgactgatttgtttatgatgtatttgtgattatacacttttaattgcttgtgtatatagttcgtagatgggaggatcgtttcactaagtatttgtgataatacttacgcatttctttctttttggtgcaggtaaagataaagtgtgatctaggaactcgtttggtttatatttgtgttttggttattggaaccggttaggattgtgttaggattgttagtcgttcttggttttgttggttaaattatttatttattcataaaatagtatttttaacttgcggtttaaatgttgctctattggttggtttaattaagtatttatgggaatatttaattatgtttttttttaaaaaagggtggggttgtttcaataagaaacactctattttacaatttcatcacgatagacatacctttacaatctagacatcgttctccatttagagagccaccagagacgataatgactttggagcgagcggacttcagttttttttcctgagcttcataacagatttgtgtgttttagaaagtaagtatacgttagggtttctactttctagcagtaaaaaaaagggatgtaaattcatgacaaaatacaaaacatagtttagattagagactgactttttgtacgatgaaacaaacacactttgatgattgtatgtccacatcatcgtaacctgagaggtaaaaaatcatattaaaaatcaaaaatatatgcaggaaaaaacatgaatgaagtgacaactaaagaacgatcggaatggagatccctaggcatattatttataatgtgagatctaggtctaaccgaacaatttttttatttctatatatatattaattttttcctttatacaaaaaaaaacttaatatggaagactaaaataactttaaaaatggcaacaaatgatatggctaatctcgattggttgataagcaaaaccttgaggcccataagtaagtcacctttcttggggtttcttgcttcccataagtggaagacgctaacaacaacatctttcctaataaaacctttttgacaactaatcaaaaaccaaagagggaagtagttgaccggaaggagaagaagttgcatgtcacatcttaattcaataaattgttctctcaatgaactaaaactctctttgatctcttaatgaacttaaaacgttaattgaagtttctatgtttaatcatcagttttatatgagtatttttacatcaaccactactttagaaattagaaacttttatattttccattttaccgattagtagaatttctctttcttgttgaagaaagtttcttgactttaattgtatttttttctcattttaataggtttttccttatcatttaaactaaagctaagattaacatattttcaagtttttatgaatttttctatcaaacatctttgaatgattttcatatatgatttagcatttaattgttttggaaacttaacatatattcggttgtttaaaataagaaactcggttgttattttcatttttttttaaatagaaggtaattactattttcaataatgtcacttaattagatgttaaatatgttaattattgatgtggcagctctcgattgttcgttctaaatcctacatagacgcctttacaagcaaataacttcaacttttatatagtatagactaggttttgacccacgctacgagtgagtttttatctaaatattttcttataaaaaatatgcaattagtttttacataagtgatctataaatctgaattttttgtaatatatcagttatgaagttaatatatatcaatgtaattataatgactttaactccatgatgattttaaattaccatatgtcaaaaacttgaatgaaaattcaaaactaaaaaagttatagcagtttagatctataaaaatgaatttattaccaaggtgaataatttttatatgatagaaatgtgtgtctttttaatgtttttactattatcaatgtgtgagtgtttaaattatattttttgtaatatgtatagtaaaattttaggatattaacaaatatttgtgtttgacctatttgttactcaaagattgttgtccttaatttgtttaatattgtaaatatgtaacgtgaaaatttttcagaatagaataacgtgatcagagcgaagaatctgaaaaaaaattgtatatacttttttcaaacgctacacttacttaaacccaaagagtgaaagaactgaataacaaaatttagtgttaagatagggatttctagttaaaagagaaatagattggttatctgatgattatgattatgatgattgatgagcataaaagtataaacacacaatacatattccgtctttggaaagaactattttaaagaaacacttacggtcttaaaacaataaagttattttcagtctcttcaatcctattttaaatttctatatatacaattgttgatactaatctggttaagtttattgtcatcctaaatccgccaagatatcatcatattgttggtaatgaccatattatcaagaagaaactcatacgactatagatagttcttgagccgtagatgaaagattttcagaatctcatcgcaccatctcaaaagatttacccgcaatcctcaaaatctgatctaaaactgccctttgataagcctcttcgtaaaacgggttttctcctttcttaaacctcctaccaacctaaccacaactcaagcgcggctacatgaattcaaactcatccctatacactacaaacacaagaggctttggcaaccctgtaaatgccgagtttaatttgagaatcaaaaataagtaacgcaaggatactcaagctcaagctcaaactcgttacttaaaaattcgcatcaaaactcgtctaggatacttacgaacactccatccatggactttacataaaaccttcatcgaagcattatcattataataatgaggaatatcattgaatggttttagtggtgttcctttgggggtgataatatttgttaaactattataaacattgtaacgtctatcattattagagcttcttctttcaaaaatcaattgtctcatcccataagataacaccagttttgtgaaaacattccgcaagcatataagttgatgtgtcatagtaattacttaataagctctttgttagaactttcaataataatttttttgattattaatggtctatagatgattatttatatacataaaccactactttagaatctagaaactttcttatttgacatgatttgttaaaaagaaattttcctttacgttattaatattttctttttcgtttaaacttttcactttctctaattatgaaaattttctttttattatttctatatgttgttttcaaaagtttacatatttgttctttacaaatacaaaaaaaatctttttcgtaaacatcttaatatagaaagtaattataattttaaaaatgtcaatttgcaaagtttgtaaatatgctaattgatgacatggctaatctcgattggtggtttttaatcctatgtggaaacctttagaagcaaatagcctcaacttttatatagtatagattacaaacatgtaacgtctattattactcgagctcattctttcaaagatcaagtgtctcatcacataaggtaacaccagttttgtgaaaacaattccttaagcttacaagttgtaagtgtcatagtaacttaataagctctttgttaggactttcaataataatttttttgattataaatggtctatagatggttatttatacataaaccactatagaaagcaattataattttaaaaatgttaattttaaaaactaataaggatttttaaatgtaaatttagcttggaattgttttggcgggaaaaacattttggtgcggaaaaaaaatggcaccaaaaatttcagtttctaatttcatgttctcattagatgatgggtaatttggtcattttattcaagaaaagctgtatttttaaaattggccgacaggatacaatattgttgcaaagaggcaatagaaaaagtgtatttttgcaaatctccttaattatatttctccactccattttattcaacacacaataaactaaaaattaactcccacaatttctttcaaattgtaattcatcacttctcatccaataaatatatattctctcattcactcattctctcatcgccttccacaatatctcaactctcaaatatttttttgtttagttttaagtttttttggttgttgttatgagttaaaaaaaatatcattttaaaatcttagttcaaaattttaattttagacaatgaaccttacattgttttttctttgtttttaagaaatatatatatatccattatctatttttattaccatcttataaataatcattctatcatcctattccactatattcatgtatatatatatatatatatatatatatatatatatcttatgttgttatatgggtaaaacacaataaattaaagattaactcccacaatcttctggaataggatgatatacacaataaatttaaaaagttttaataaaattttgaatgaataaaatatttattgaaaattttgagatatatgttttatatgtctattaatagttaataatttaaattccttgaattttataatattaccatgacaaatagtttaatttaaatacataaataaaaaataactctaatacaacttttaggtttcacaacatttatcaaaagaatagtttttttgtttataactctctctgtagttttagatattttggatgactgcgcatttttacgtaagacgttttgattgaatctcatgaaataaattattgtatggagaataactttaacgactttctcattttggtatccgcaaattcattattgtttttcttttatctttgcttcattagttagtatagctcttctaaaaaaagattctatacaaaattatattcataagcttatctatacttttttttaacaactaatatttttctcacattcttttcaatatgtatatgaatttttgtcttcacaatttttctcagagagctatcactctctctatctttttgcaagcactcgttttatttgtttcgttctttcttacagtttctttttacatcatcttatgatttagtctaagcaatatgtgccctacattccaaaattttctcatactccatatttcttctttaaaaatctcttcctttccttgttagtataaaccgttttcaagctcgtcgagaggtaactaagttaagtcaatcaacatttcgtttgaatttttgagaaaaaaacttcttttgctctattttgtgttctattatgctaagaaaatgttttagcttctaaattggttcttaactctatcacgtctcttttttttatgcagtttagatcctcttcaccttcacgcttcccaaagtgaaagacatcaacttatatctttgggaacttgattcaaattgatacgattaagaacaccacgatcaaaccatgtctttgttgctttaacgcttcacaaaccaaacataccttaatccctattcacttcaccttcttgtgaaataatctttcacatacttctttcgtactgtatctctttccatcttcttatgattttgtctaagctgtatttgtcctacttttcaagcttttcacatgctccatagttcttctttgaatatcccttcatttccttgttagtaagaacctttttcaaactcgtcgagaggtagttgagtcaagtcaataaactcttcttttgaactttcaagaataaaatctttgtttttctctgttttgttttctgttattctaataaaaggttttagcttctaaatttggttttaactctatcactttctctcttttgaagttgttgtttaaatcctcttcaccttcacgcttcacagactgaaatacctcaacttatatattttagaacttgattcaaattgatacgattaggaacaccaccatcaaaccatgtccttctaaactttaacgcttcacggaccaaaaacaccttaatctctcttcaattcacctacttgtgaaaaaatctttcacatacgtttttcctatggtatctatttacatcctcttatgatttgttacagcagtatatgtcctacattccaaacttttcacatacttcatatatcttctttaaaaattcctttcttttcttattaataaaagcctttttcaagctcgtcgagaggaactttaattaagtaaataaattatttgtttaaacttaccaaaataaaatttttaatcgactatcaatggtccagatgtttatttatatagacacagtgagactaacaatcccattaatatttctatattatagtaattgaattaaacattttcttatttctatatctctttttcattttcataattattttaatatagaaatttgttaaaattttaaaacgtaattttttttttttgttaaattaacatatgtttttctttttgataaaaaattaacataatgactaaaaatgctaattaatgacatgtttaatcgcaattcgttcttctaaatcctatatcgatgtctttaaaaactaatagcctcaacttttctatagtatagattatttttatacttttattttaaactaaaagtttcttcgaccatcattaacttatttttttttgtgttgttagttgaatattttttttattttgtgatctaatcaaatcaaatttaactcaaaatcaaacgaaaatgtcaaccctaattatttttccatatgttatttttataaggtttatatttctctttttctatatattgtttttttccttttcataaatatcttaacatagaaaattataagaatttaaaaatataaactaacataatgctaaaaatgttaattagcatatgcataatcgtgattggtttctactaacaaaaatttactttcttttcttttctttttgttattttctaaaaaaatttccatttctctttttctatatattgcttttttccttttcataaatatcttcatattgaaaattatcataatttaaaaatgtaaattaacgtaatggcttaaaatattaattagcgagatggttgtttaaaatcttatgtggacggcttaagaagcaaatagcctccacttttctatagtatatattatatagagtacggttttgaaagttagtaacttacgagatcatgacacatcttaatttcatcgatattagattttaaatgtcttctcaaatcttatgttattgaacatggaacttacttaatatcattcaacataacttctaatcacatgttattcaatcaataattaataaaagttttaccaaatcctatgttattcaaaaatttgctataatcttgtgatttggttttataacggatttttggagactttagacataattttagttaaaaaaaaaatatagatccataaatctaatcctcaactatgatactttgagagatttcaatcaaaatttaaaatataacgttacccacataaacttgtataaaccttcgtttattgaaatcttaagataatggcaaattctccaccattgtcagatttgttctgtaatcttccataatatattagtgaattcaaaacttgtatatcgtctataatagactagtagaacaagcacctttttcactatctattgacatcatcaatctctttccaatgatgatgacgcatcttggtccatgtggtttgctaattccactgagcatagatttctcataccctggcttcttgtttctaaaatccctgggttgcttgtgatgctttgaaacaagtaaataaaaagtaattttgttttcttgcaggcagcttggaaagagattaagcgataatctctcccggtaaatctgatcttgtcggatcattgttacctttttatctccttaatggagcagtttctcttcccaatattccctcatatatggactggattggatgttcaaggtttgtcggtattggaaagatcttcctcccggcctatacactttgctgcctttgttgcagtggccttaacccctcgggttactttggatacttgtaacacccctattttacaattagactatgaggccctagtccagcccgctaatgatttgaatccaagtgaaaacctaatgatcccacgtgattataaaaggagaacgcaaactccaaatcaagtcacaaaaaccctaagccggcaaccttgcaccactcagaccaccggagatcgttgttgtgttgagccggagtcaccgcgtgaatcatcctcaccggagagataacgcacgagaatcgattctggttttgatctcttagtttctttaggattgtttttctttaggattgttgaaccaatctaactagtgaatggaaccatcgtagatctgtgccactccgctgttccaaccgccaagcaaaccgtaagggagactcgtcgagaaaagtcaccgagaaaggtaatcgggaatcttctcgtgttgttatgtgattatgttatttgattattaaaccatgatctaaattaaaccagttaaaaccaatgaatcgtttgtttagttagaagttacgtgaaattgtgtcgtaggaagaagaagttgacttcattcattggtttagttgttagagtaccggttaattgccaaaccggaagctatcattcacgtgaatgcatggatccaattgtggacgtagtgttacatgtagtgaatgaatcaatatttaattactagatttagttggattattttattaaattaagtctagttaatttattgaaggatatatagtttgggttgattatgaaattaattatagattattaatgaaaaataatctttgatcgattatttaaaccgtcgcagattgagatcgttattggaccttttcttgttgctgttatttcgaaaccgtgttatccaaccgagttgctaaggtgagggcgggatctgtggaaacatagtatcacctttctacttttgtacttttgaagttcatttgtataggattagacattgggtgttgattgttaattattaggaattaattgttaaaacattataagatgtgttgtgtgatgttatgcgttaggtgttagcgtgatatacatgttgatttgtttgacgtctttaagacgtatttttaaataaatatataaagataaataaaagagaataatgatattaaagaaaggataacattgaggatgttggactgtaatggaaccgacgggttcattacaggtcattaatcgctgacgtgcaatgagaggaaggatcgagctacgggccgtggtcttccatgaataggcttgaggagccataaattaacgtacgttaaaaactaagaaaagaaagtaaaagatcttgtggtgagcaagacgaaagcttgtctgttatagcttactacgaaagtttaagctatttgcttgttgtttgagtctatgcttatgaaatggaaattgtgtataagtataatcgtgttattgtgattcggtggacagttttgactgccttcactgagtaattaattactcacccccttttcttttccctcaggtgaggaagagaatgttgagtagctgctcgtttggtgttatttcgggaactttgggttttatttgatttatcgatatttcttatatttctaaacacggtttctttatacatttttatccaacgattttaatttatttatgctattattttgagacaatttatttctgattcttaataaaagaaagtttcccgaaattatgatattttatttcaagatttgatttgaagaagttgaataaatgaatggaaaagatgaaagtacgccgtctcaaggttgagagagacgggtattataaatggtatcagagcagaggttaaagtcaagccggtgttgacccggaagactaactatatctgtatttatttttattaaaaaaaaaggtttttctaataatatatatttttagaaagcggtttaaaaaaaaaaaaaaaaaagttttcagtattgaaatggggaaggggattttaaaaaaaaaaaaaaaaaaaaaaaaaaaaaaccaaatgagctagacttgattttaaagtagttgtgtaaagtttcggttattgtaagggtcctaatgtttagttttgtgtaaaacagaaaatgccgccaagaagagcaagacgccccgcgaacgctcggataaaccgagtagcgaaggcaccagttgttgggcaagaccagccacctgtggtagctcaaccagctcaggcagctcaagcagatgaggcagctcaggcagctaatgcagctcatgcagcagagattgcagcgaatcgtaccgagatgcaggagctctgaaacatgatgcgtgagattttggatcgacctgtgtatgcaccgccaccgccaccagcacctggagttgctgcacctcagtaccatcagccaccgccgccgccaccagcacctagggttgaagtaccttagtaccatcagccaccagcgccgcttgcacggaccgagtattttgggacgatgaagctcatgagtaccatgggcacagagtatttcagtggtgggtttggttaggttcgcgctgatgattggaggcagatgttggagaagaatttcaggacagcgaggtgcccagaggaatttaagaaggatcttgcagtgcattacctaaggggagaagcagatcattggtggaaaaattttaagaggggcttgcctgctggatatgtgcctacgtgggaggatttcttaagggagttcaataataagtactttccgcgggaagctatggaacagtttgatcatgagttcatggagcttcgtcagggcacgaggaccgttcgtgagtatgatgaggagttcagtcgtctaaggaggttcactatgaagaattttggagagcaggatatgattcaaagattcatgaggggactcagggttgatattcgtactcgtacctccattcgagggtgcactagcctcgttgagttagttgaggaggctgctaggttagagataggacttgtggaggaagttatggatctcaagaaggctcaagcaaaggtaacaaaaggagctgaatctcagaagcgcacttgggataatcgtggtgcagtatcagtccaaaatggtcagcattgcgccacatgtggtaagaggcacagcgggcttgttagagtaagagtgggaattgcttcagttgtggacaagctggtcatatatggtcgaattgtccaggaaaagacaataattgcaggaggtgttggaagccaggtcattttgcaagggattgtagagtgaatttggcagggggacaaccaggaaatcagaacagaggaattatgccaccaccgccaaagcggcaagcagtgggacctcgagtgtatgccatagcaggcgaggaggatgttgatgaggatggcgccgacccgattgttggtaagtcttcttaaaaatttatttaagtgatttttctttccatttttggatgagtattgcttgtgcttgtttttggtgttcttgtctttcttagtttaagaacctgtgtaggatcggttcttgttggaggagtcaaagcctacactatgtttaatagtggagctacacactgttttgtgagtcctgagttagccagatgttgggattccacaattgagtaatcggaaaaacggagaaaagttgaaaccgcaggaccaggattggtgaagtcgtcacggacctatcgggatgtccctgtagagattgaaggtgtggagttgtttgggaatttcctagagatggagttgaagcgttatgagataatcctcgggatgggttggttgaagagacataatgctaatttggattgcccaaggttgcgggttaattttactcgagaagagggtaatttgatgtttcagggagtcgaaactcgtagcgggccgatcttttcgatgattcaagcagataatttacagtggactggacctgaagcttacttggcaacaatctctattgacggaggagatacaggaatggaattaaaggatattcttgtagcagcagagtactcagatatttttgaaccgctccaaggaccgccaccagatagaggagatgctttcatcattgagttagagccagggactgctccagtatccaagacaccttaccgattagctccaacagaaatggctgaactgaagaagcagttagaggagcttacagacaaaggatttgtgaggccaagtagttcgctgtggggagcgcctgttctttttgtgaagaagaaagatggaactttcaggctttgtattgattaccgtggcttgaataaggtgactatcaagaacaaatatcctttaccgagaattgatgaattgttggaccaacttcagggagcatcttggttttcgaagatagatttggcatcaggttaccatcatattgctatctctgaggcagatgtgagtaaaacagctttcaggacacgttatgggcattatgagtttgttgtcatgccgtttggattgacgaatgcccctgcagcttttatgaagctaatgaataacatattccgggagtttttggacaagtttgttattgtgtttatcgatgacatcttgatatactctaggagtaaggaggagcatgttgagcatctaaggattgtgttacaacggttgcgagaccaccagctttttgcaaaattatcaaagtgcagtttttggcagaaaaagattggatttttgggtcatgtcatttcagaggaaggtgtagctgtggatccagagaagatcacgactatcactcattggcctagacccaagaacgctacagagattcgtagttttcttggacttgctggttattatcggaaatttgtggaaggatttgccagcattgccaaaccactaacacagttgacatgtaaggatgccaagtttgagtggacagaagcatgtgaagaaagttttggaaagttaaaggagcatttaactcagacacctatactagtattaccgaaggctggggtaccttatgcggtttatacggatgcatcgggaactgggttaggatgtgtatttgcatatgcatcatggcagttgagaaaacacgagattaattaccctactcatgaattggagttagctgcagtggtttttgctcttaaggtttggagagcctacttgtatggggagaaggtacaagtatttactgatcataagagtctgaagtatatcttcacccaagcagatttgaatctgagacagaggagatggacggagtttcttgcagactatgatttggatattgcttaccatccaggaaaagcaaatctggtggcagatgcactaagtagaaggagacatgatgtgcatgcaaccaaagaggttgaagagcttgtttcagctttgacaagtctcaatatctgtgaagctttagtggatgatgaagtagttggcttgaaagcggtaaaccaagctgacttactatgaagaattcgtgaggcacagaaagaagatgtggtattaaagaaatcagtggagagtgaagttgaaggttatcacattaccaagaatgggacatttgtttttaaaggccgagtatgcgtcccagatgataaagatttgaaggaagagatcttgagacaggcgcatcagtcacgttttgctattcatccagggtctaccaaaatgtacagagacttgaagaggtactatcattgggttaagatgaaacgagaggttgctgactgggtagcaaagtgcacgacttgtcagttggtgaaagcagaacacaagtctccaagtggacttttacaaggtctaccattgccagaatggaaatgggatatggtgactatggattttgttactggacttccgagaacagcaagtaagcaggatgcaatttgggtaattgtagatcgacttactaagtcagctcattttctagcagtcaataaaaaagacacagctgaccgcttagctcaaaagtatatggatgagatagtgagacgtcatggagttccggtaagcattgtttctgatagagattcgaagttcacatcgttgttttggaaagcatttcagaaagctttgggaaccaaggtgcacttgagtaaagcatatcaccctcagacagatggtcaatttgagcggacgattcagactttggaggacatgcttagagcttgtatgctggattggggaggacgttgggaaaaatatctacctttggtagaatttgcttataacaacagttatcattcaagcataggcatgccgccatttgaggctctttatggaagaccttgtcgcacaccactttgttggacagaagtgggggagcgccaagacattaagcctgaaataattcaagagtcaactgagcaagtagagctgcttaaaaacaggctaagagaagctcatgaccgccaaaagagttatgcagataaaagaaggaaagggcttgagtttaaagttggtgacttggtgtatcttaaaatgagattgttcaaaggactgaatcgttgggctaagagaggaaaacttaagtcgagatacatgggtccttaccctatcatagagagagttggagctgtagcttaccgtttggacctaccagcagatttggcagcatttcatgatgtatttcacatatcggtgcttagaaaagttgtcacagaaccaaagcttatcatttcacggccaccagaggatcttgagttagacttatcggtaaaaggaaaaccggtatcaattgtgagtcatagagaaaatggttcacgggggaagaaagttaagtcgattcaagtttgctgggaaagggatggaattcaagagttgtcatgggaatcagaaagaatgatgcgggaagactacccagaactttttaaggacgaagaggaggatcatggtgatggatcgaattcgaggacgaattccattgtagtgggggagaattgtaacacccctattttacaattagaccatgaggcccaagtccaacccgctaatgatttgaacccaagtgaaaacctaatgatcccacgtgattataaaaggagaacgcaaactccaaatcaagtcataaaaaccctaagccggcaacctcgcaccactcagaccaccggagatcgttgttgtgttgagccggagtcaccgcgtgaatcatcctaaccggagaggtaacgcacgagaatcgattctggttttgatctcttagtttctttaggattgtttttctttaggattgttgaaccaatctaactagtgaatggaaccatcgtagatttgtgccactccgccgttccaaccgccaagcaaaccgtaagggagactcgtcgagaaaagccaccgacaaaggtaatcgggaatcttctcgtgttgttatgtgattgtgttatttgattattaaaccatgatctaaattaaaccagttaaaaccaatgaatcgtttgtttagttagaagttacgtgaaattgtgtcgtgaggaagaagaagttgacttcattcattggtttagttgttagagtaccggttaattgccaaaccggaagctatcattcacgtgaatgcatggatccaattatggacgtagtgttacgtgtagtgaatgaatcaatatttaattactagatttggttgaattattttattaaattaagtctagttaatttattgaaggatatatagtttgggttgattatgaaattaattatagattattaatgaaaaataatctttgatcgattatttaaaccgtcgcagattgagatcgttattggaccttttcttgttgctgttatttcgaaaccgtgttagacattgggtgttgattgttaattattatgaattaattgttaaaacattataagatgtgttgtgtgatgttatgcgttaggtgttagcgtgatatacatgttgatttgcttgacgtctttaagacgtatttttaaataaatatataaagataaataaaagagaataatgatattaaagaaaggataagattgaggatcttggactgtaatggaaccgacgggttcattacaggtcattaatcgctgacgagcaatgagaggaaggatcgagctacgggccgtggtcttccataaataggcttgaggagccataacttaacgtacgttaaaaactaagaaaagaaagtaaaagatcttgcggtgagcaagacgaaagcttgtctgttatagcttactacgaaagtttaagctatttgcttgttgtttgagtctatgcttatgaaatggaaattgtgtgaaagtataatcgtgttattgtgattcggtggacagttttgactgccttcactgagtaattaattactcacccccttttcttttccttcaggtgaggaagagaatgttgagtagctgctcgcttggtgttatttcgggactttgggttttatttgatttatcgatatttcttatatttctaaacacggtttctttatacatttttatccaacgattttaatttatttatgctattattttgagacaatttatttctgatttttaataaaagaaagtttcccgaaattatgatattttatttcaagatctgatttgaagaagttgattaaatgaatggaaaagatgaaagtacgtcgtctcaaggttgagagagacgggtattataatactatctttcaagattcttttgaaatcgttgccttgcgatttcttatagtttctcattatgatttgtattgtctatctatctcttttttaaccatcgtttggtggtcttttgggtattcgtttaattacccttatgttggtttttttccatttttttggatgtaatccctcctctgatagagtttgaggcgtaactctaatgaagttatcagttggtccgaaaaaaagttcttgagctgaaataattttagagtggataacctattagaaagtgattgtttgtatcgtgtgaatgaaatatatatatatatatatatatatatatatatatatatatatatatatatatatatcaaatgatgatttgtaaggtcgattaataaatatataaaaccttaagatataatgaaccggccgtaaaacaatgatgtgcccataaaccgaaaagaacatgggattcataaatagtgacagtcagaacattacaaacttatgaacatataatatagcgagaatttgatgataagaaacagcacacataaattattttacggataacttaaatttcagttattacatagtaaaccaaaaaatccctcgcacaagtcttgaggaggcatggagtagaatttcacatgagcaaatttgttctggttgcagagttttttgcaagcattctcacataaaggaagagttgcctttttaaacacttttatgcactgatttgggacacaatgtttaacacatatttctatcgtactcgcaaatgttgaaaccatcatcgtaaataaagctacaatgatcaaaacactgtatatcttttttattgtttgagtcgccattatttgaagagatgaatttatgagtgtttaagcttattaaaatcttgtttgtgttatatagcaaaaaaataattagcaggatgattaatgttgagttggcttttaaaactatttttactttctatagcaaaactatttttatccttttaaaattatttattttggaagtttatttgttttttttcttattgtaaccaaacggttttttggtgcatttgtttactaataagttagttttttttatgtattggctgtcctaacaatctatcctttcaaattcttgttgtcaagaaacctacctaatttggtgtaaagttgtagatgatcatttctttaccgtaaatacatgctgcatctgagtaccccaaaatgcacaaaacgtacttcaaccatcctttatatgaaacaagaactaaagaaattttatgaatattttaatgatggttggaactgctagaaataataagatcatcaatatatacaagaaaatgaagtcagagattaccatcagtagatttaaaggagtattcagatagagattgtagaaagcttcaccatccaacaacgaggagtttgtcgaagactaaaaagtgatttatggagatggctaacttcagaacttgtcattgatacgaaaaccccgagaaaatacaaatattttagcttctcgaaccgtacacaaattatttgattgcttttatttactgtttagactatcaacttaaaaaaaaaactatggagagaggagaaaattaaacaaatgagaagagctctgttgttctccgtcaaccatatacatataccctataccatatacacataacccctaaaccctaagtcctaaactttaaacatttttattgttgcccataaatattaaacataatcccctaaatataaacaaattgagatagaaaattcacatgacccaatccatatggataacaatggaaatagaggtgtcaagcgagccaaagacccgcggactcggccaaaatagtaccatgacggggcaggcttggacatcatttcttaggcccaaaaaatagcgggcctcgcggacaagcccaagcggattgcgggttttagcgggttttgtctgcggatttgcgggccggcccgcggactacaaatatttaataaatatatatataatataaataaataaacacttttctataattcttaaaataaaaatgtgaaatatgtgatagtgtgatgaaatttaatgtataaaactataagatttacaaaactaatactaataaatatttttttaaaattaaaaagttgttaatttaatttttaaagaataatttttttaattttaattatttttaaaaataaaatttaggcccgcgaggcccgaggtcttagtgggcctgcctgtcgcggtcttacaaaaatgaatatccatcgtgggccggtccgtttgacacatgtaaccataaaccctaaatcattgtagacaaccatgattattcaacccaaaacccaaaatcatctaaattaaacgctaaatcttagacaataaagcctaaatcctaaaatgtaaaccctagatactaaaccctagatactaaaccctaaacccttgacataaaccctagcccttgactttaaagcctaaaccctaaatcctaagttttatatgtacataatcaataaccatcacttttggtccatgataatagaaagcatgcttctaaatctgaaaacgtaaaatattattgagatcgatgtggtcatacactcgtatttatgttttgttaatatgtaattgtggataaataaatataaacatttccgtaaataactttttgtggatatgaccaatagaacttgtttcatctatcaacatcttttacataacataacacttgttttatggataatattatcaaaccacaatcattttgaattatcgaccgtcaacacacatccaccaaactctaaccatgtggttatttcaatcatttcgaattatcgaccatccatgtacatccaccaaactctgaccacgtggtttgcataatagtaatttgcatacaaatgagaagggcaaatagtaatttgcatacagaacatccttttcttgaaaccctagccgccagtgtgcttatgatttttttgtatatcttccattttcattatttgctcatgtgttttaatgaaaattgcacaaaactaactttaagatacaaatttatagtaagaatatatgtttgggttatttaattcaactctctctctctttgaggaatttcaagaaacacttggtggacgaatctaaaatttgtaaaaagacaaaaaaaattgactaagacaatgatatatacagtaagagaagaagaaacccataaaaaagttgaaaattttaaccttatgagattgattaaagaaggagaaactgaatcggaatctagaaaatctccaacttttaagatctaagaagagaaagaaaaaaaaaacttagatctagtttttggtgtttttgatgagagagaagagagaaaaagtatggaacgattatcttttttcctaaaagaaatattgcaactgttttgtatttaattttataaagagaaaattacaacaattaccactttttccaatttttataaaatctaccacatttctaatttccttataactcctaccacatttattattgaattaccaatttatcctctctatttatcttcttatttatctctcctctctatttatctttcttctctatttattttcctttttatttatctccattctctcgaaacacgtgctctttaaccaataaacattatatttgaacaaataacttttgtttttgtctcgaaatcttgtccccaattggaaattctctgttgcgtctaaatcttgtccccgatttcatcatctttcaaaattatcatgaatcccacatctcatccactaattgttctcatttaaaggtttcaaattttatttatatttttcacaatctattttggtacacagattagttgagcattattgtcttcaccgacccagactattgacttttttccttctattgcaaaataacaaaaagatccagttataatatattttatcttgtctatcattcgatctgaatttatccccgatctaattctatcactcattcgatatgaacttgtccccgatataacatattattaaaataagattatatgcaattgtaaacgtttaggtgaagacaataacgttcaactaatctgtggaccaaaatagatggcgaaaaatctaaatgaaatttaaaatccttaaatgagaacaattggtggacaagatgtgagattcataataatatagcaagatgatgaaatcgaggacaagacgtagacgcaacagagaatttctaatcggggacaagatctggagacaaaaacaaaagtctgtcaccaattgtcctttatctaacacatcagtctgtcaccatcaagagcaatttcgtccacaactgtgcatgtgacaatgaaatgtggtagattctgtaaggctgagtgaaatgtggtataaattgtaagacatattgcaaaaagtggtagattttgtaagattcccttatataaagtggggagaaagaaaagtgaatgaagagagagaaaaagtaaaggttgctaaccatagttagtttggattggttaggttggattgagggtgtagtgataaaaaaaacttagaaaagtgccaaatagtactccataaccaaattaagtttcaaaaaaatgcccatagcataatatttccttatatatatatgaaagtattatattttttttgcaaatttagatgaaaaacttagtacatgatccaaaaagtattggataaatattctaaacatatttatgtactatttgatctgtaaaagttaaatggtggtgaaggtatattttcctaacaaattagtattatgattttcttattatataagtgtctctctttaacaaactttcctaagttgagtagcgaaatcatttttccatctttgacttcgtcttctttgttgttcttttcaagattctttgttactaacatagtatcaaagctttaagcttttccgatggtgactactcgtcgaattggtcgtcgtgttacttaagctacttcttcggtttgtcgtacaactattcgcgatgattcttcaccagaagctccgacttcacatgttcatcagaatcatattctctgattctaaccaaatcgccggttatcatctatacgttcatcatgatctaaataagttaacatttttttttttctcttcctatttttttattgggaaagttatcctttttgacacaatttacaaaaatggaaaagtcttgaaaaaaataaaacaaaatcattaagacctagtcaagtctcccttctatttatctagagtaaaatttgcctagtttgttgataaggttcttcgattagtctcacttcatcttaataaacagatcgacgccgtcactctgcaaacaatcttcatcgccgaatcacttgcctacaggtatgactttgtgcttgagtactttagtaatcacgattaattatatctctttgtagaagttaactaattcccgattataaattagatttactgattcttagatatttataagatttatttgctattatcacagcaatgattgattaactaagatatttgtgatcttctagttggtgcatgcatattttcaacaaggatcttcttattaaattcatattataacgttacatatacttttcagaataatattataattattgtaaaattttgttttcttaatacattaatatatttgaacttaataatcatcacttcaaatacttttcaggtagctatgatgataaaattgatgagtgagcaatgtacacgttgggaatgcatccaacacgcatcaagatcagaccaatattgcagcgagagatgcctactaatagttactagtctttcagaatacaacaaatactgaattttgacaccaactcatatattgttcacttacagaacattatgctgtcaaaattctgaccttgttaaaggttaaaaagaattgcgaagtttctcacttctctcaaaaaaaaaatttaaatccatgctaggaaatcaagtatagtctatatttactttatcagttttatctcccatcctatataatgttattgtatatcagtatatatatttagtgacttttgagtttcattgcagatatgttcctcgatttttatcatggaatgccaaacaactgggtgttcagtggctcatatcatattcctgtaagcttagatttcaagtggatagaaattcgtagcgaaaggatggatgaagtgtggatatcaggtcgtagcgagaagattaatgaagtgagacattgcgttttcaagcctttttctacagaagttaataaatgggaaccccaccagttttcaagtccagatgttatggaaaaagccgtctctgtgatgcgttgcctcaagattaacgaacttgtcaggaaaaaaatgtcctaaaagggcgagtgaaactgtcagaacaagaaaatgtcctaagagggcgagtgaaattgatgcaccattatcaggtactaacgcctaactcatatctatctatatgtcttcatattttcttttttgttgtacgcaccatcataatgatgtatgtaatgcattgaagataaatcaaagaagactaataaaaaacacgtcaaaacaagaaaatggcctcacaaagagagactaatcgaagaatctttatcaggtactcatgtatcgttcattcatattgatacgagactatggttaggttgattagtccacggttaggacagttaaattaattagtttatgtagtttactttatgagtttgattttcataatttcctttctacgttaaagtgctttctttttacgtttaggttagaatctaagttgtatcatggcctatataaatataggtctttatactaattaatgaatagctaagctccaaccattaacctaattctctaaaatagagttgggttaaagggaagcttttgcttaaaatttttggttcataacacatatgtcatgttgctgtctcttttttttttttttataactattatactagctaactctaaaattttcgttcttctgaaaactaagcagcagagcataaacaaactgattgcttcataagattatactcggaaatggaaagtttggaaaggtattatatgtcttctcaattttgctcatactatatacctaaaatctttgttatgatatgataagatgatatgggactcaatttaaagtcatagggccgttgcgttgttcgcgtcggctcatcagaacatcgataagaagaatagctttgcatttgtatctgaggagatacgacgacagatggagaatatcaaatcacatatcctaacaaacgggcaagtttctttattagatcacacataggtttttatcattcctgtatatgtatattatacgatgttattaattattgtaaaggaaagtgtaataatccagccaaatatacgagagaacatgtagaaacgggaagtttttttgaaaggtatgtatgtttttgatataaaactcgtatgaaccggttttggccttataaactttcttcttttctaaaatagaattaatcatgaattgtcagggctgtagcattgttctcgttggctcgtagaaacattgagaatagaatgaaatctggagcagagatgaagaattcctcagaaatcgtagcatgtgtatcctccaaggagatacataaagagatggagaatattaagtcccatatcattacaaatagcaaccatataaaggttaagcttgagaaagacttttagtatgttatgttacaccctgaccttttatgtattgatttcttgggtcttgtccatacctatgtttttttttaatatcaaattaaaactgagtttatcatttattgcctaaaaagccgagtaaaagaacttgggatcgtcgatctcttccttcaaaatttggatgagtcggtccatggtctgaaaacactttctaatgtcgaattctaaaaacaatcgagaggttccccactcttccttgatccgtcgtaggaacgagtgggaggcctgactaatgctaatatgtatcgcttgtccaaagccacaaacttattaaccaattagcaaactgggtgttggtcattttggaacatgattatcatcctttattgatcttaaaatatgtaaaacatttcattttgttaacataaaacattttaaaataaaagtaaaatattattaaaaattaaaaaggaatataaatgaaaatgaattacaggaaaatgtaaaattaataaaagagtagtcttgaaagagaattcatagcaatttctatagaataaaacgtagaactcatatttaactggagtgaaatatagaaaaacaaaaactaataaatccaaaaatatttttgtgaaaccttataaagatgaaacattagtaaaatctagcaccagaatttaaattgatgagtgaaatgaaaattaataaaaaatatagaaattgtctttgaggttttaaaaaaataactttagataaaaattcatatgattttttagaaaaataaatataatctgtcacttacaaaataaaataattttgaactattatgtatgagtttatatcaataatttattttgtaatttaccttattgtaaaagtaatatatcttatttttattaatataagatatcaaatcataaaagcttttaaaatattttttagtcatctacatatattaaaacaaaaaatactttataaaaaataaataaaaattgagccacgtaactcggactattatctagtaaccaatggaaaaaggcaaatatattgaacgtatcaaaactttatatcatcgattgagataatagatctgttttattattcttgggatacgtagtatttaagaattgcacaaatacgatcctttgatttacaaagcaacccctagaaattattttattcgataaagtggagtttttctttactttattccacaacagacccaaccctaattcgtttcattctctcgtttcttccccaaaattctcaacttctcgcgctcctaaccctagccttcccaatttcctcatcttctagatccgcttttgtgatttggtaaatctcttctctccctcacttctaatttcgttacagggcaatgttttttacttttgatcagccaatttcaaaatcctcgtttgtttttcagaaatttctagggtttttttttggtgtgtgttttatggattgttgctatgatttagctgaattttgttgaattaaactgttttcttttgctgtttagttctattcaaagttttgtactttgtggtgaagacccaattttgttgtttctgagtcctaattcaaagactggaactttaactctttagtaaatgtctctttgtgagtaaggcatttagctttctctcctctatatataaaggtgagattttgatgagttcttgagtgaaggaagagttaaaaatgtagggtattatctagagtgtgctaatctggtatcagagtttgtgtgggattgatttgtacagactattgcttttgaaattccaagatactcagtttgttttccctctcttagtgtgtatggaattgttgctatgattttagaggattacagaagttacttggtttggtagctgacttttgtgagattcaactatttccttgtgttcttttgctcttttgttttgcttagttctaccaaagttttatcctttatggtgcagctagcctattcaaagactaaaacttaaaccctttagtaaatgagcaactctttgtgattaaaacattcaagcttctctaatctactaaaaaggagagattttgatgaaattttggttaatgaagagcaaaaatatgcattttagttgcggccattgtgcttatctggtgtcagaactcagaatttgtgtgggtttgattatatgctagctacatttggcttttgcggtgatttgctattctacgtgtgttctctatacgttatcaagtctcagtttagttcaaactgattgtgaattcttacagttatatgcgctttttgtttatatttaaacatttgcacgcttgacatttactaaaatgaacttattgtcctatcccggtttgctagactgacccttttaccggctatggttgtagtttaggcgtattacttaagacgatacaatttgcttgtgtatctgatgtaacttttttcttccgtttcgagttcctcaggtttctgtgggtatgggaaaaggtaagcttatattgatttgtcaatctggcggaaaatttgtgactgatgatgatgggacaatgacatacactgggggagaggcagaagcgatagatattaatcatgaaactacgtttgatgattttaagctaaaactggcaaaactcttgaacttggcgtatagttctttgtccctcaagtattttcttccgggaaacagaagaacccttatcaccatgaaacaagagaaggacatgaaaaggatgtatgatttccatctgagctcagtcacagcagaagtttttattacaggacaatatggcttccagtctgaagcagttttgtcacctggtaccaggtattccctcttatttaaccatgtttcttgcaggaattttttttctttatatcgatttcgtagctttctcttttactttaatctaagtcttccagagaatgtagtagatgtatcagttttgcatcatttaagaaataataatgtgatgataactgataatttattatcccatttgtttgagagctgagtgaattttaacgactgcctgttttgctcacgtctctgaaatgcttgagatttttttttcacatacaaatcttttttacatcaaacttcatttacttcaaaattgatatataccattaacaagagaacattttcagtgttattggtttttgatgtctagttgtctacacaaaaccaaaatgttcattacaatgacattctcctatagataaattaggtgctctgttaaaagggttcgttgatttgtgtggtttaaaggcagtcgttgatacataaactttgggctaatttagttttttttgtgttatcgcttttgatccaatggaggagactcagacattctgctctacagaaataaagatcttaatgtcagtagcaatatatagttctactgggcttgtgatcatggttgcgtaatctatttctgtttttaattgcaggtcttataatatagcaatcgggacggagacgacaccggtggcatatgggaatgtagccaatgtacccatccaagttatcacaggaactcctgaagaaaataacctcgctgatattaatttgagttctagaaaggtcgcccccagagttacatctgaatccagtggccttattgatattcccgtaacaatatccaccattccggtgggaccagccaaatcaacctcaaaaaaattcaagacaaaagggaagaatagtcttgtttctaatatcaccaatctgactcccaaaagtttgaaacaaacattcataggtagtaatcctggtagcaaaagctcccctccaacttctctgagtgttgtgtgtggtgtgactaccagttcccctagaagtgttagtaaacgaagacgtgtgatggaagaacccatcattttactccaggatgaaaatgtcacggatacaaggagaagatccttaagaaataggggagaaattcgaaagcctgtaatagaaactgatgatgacgacgttgatgctgatgaagttgatagtgacgaagatgatagtgatgacgttgatgctgacaatgttgaggatgatgatgacaaggactatgtgcaggatatagagacctattaccctgaaactgaggatcttgactatgaacgtgagataaattattctatctctgaagctaacgatggttctgtagagagcttggtagcctcatggaaacgttgcattactggtgtgggtcagggatttgaaagtgttgttgaatttcgtgatgcactgcagaaatatgcagttgcttgtcgttttgggtacagattaaggaagaatgaatcaaatcgtgcatgtggtgtttgtttagttggaggttgtccttggaagatttatgcatcatgggtaccatctgaaagtgtgtttaggataaaaaagtttaatagaaggcatacgtgtgggggagaatcttggaaatctgctcatcccaaaaagaactgggtagtgggtatcatcaaggagaggttgcaggagaacccaaatcagaagactaagaacattgctgactctttttttcaagattttggtattgagctcagttattgcactataagacgaggcattgatgaagctaaaggaggacttcatacatcattcaaagaggcatataagtatttgcctcattttgtgaataaggtagttgaggcaaaccctggaagtatggtgaatctggtggttggtgaggacagaagatttcagcggctttttctgtctttccaatcttgtatacatggctttcaaactggttgccggccgcttcttttccttgatgccattccatttaagtctaggtatcatgagattttgttaacagcttctgccttggatggagatgattgcgtgcttccagtggcattagcccttgtcgatgtggaaactgatgaaacgtggcgttggtttctggaacaattaaaggtagctttgtccagtttacggcctcttacctttgtctccgaccgagagaaaggactagtgacttctgtgttggagattttcgagaatgcccatcatggttattctattcattacttgatggaggattttatgagaagcctgagaggtccgtttcttggagatgggaaaccatcgttaacatactatttactggctgcagcacgtgctgatcgacttgatgggtttaaggtttacactgagcaaataagacgagtgtctcctagagcttatgattgggtaatgcagattgaatcaaagcattgggcctgtgccttgtttgaaggtgaaccgtacagccatattacgtcagatgtggcagagatctactcgaagtggattgaagaaattcaggaaacttccatcgtccagaaacttgtggcatttgtgaataaaattgtggagttggtaaacagtagccaagagaagtcaaaaccgtggttcagccaacttgtgccatctaaggaggaaagtctagtggaagaatgcaagaaagcaggctcgctaaaagttttcttttgttcagacacgctttttgaggttcatgatgggtctgttcagcttgtggacatcagtaaccaaacctgcagctgtttcggatggaagcccacaggccttccttgccagcacgcgattgctgtgttaaacacaaaaggaagaaatctgtatgactattgttcaagtttctttacggttgatagttaccgtttaacgtattcagtagctctaggagcagttgcgattgatttagctttggtggagaatgaaggcagcggcaaggaagaggatgaacaagtacttccacctctattttcccgagttcagggagtggaaaagagaatcaaagaccggaaaagaggacgatctgtatgctgtacaaagtgtggaggagtaggacataacaaggctacttgtaaggatgattgatcatcgacagcctccatcttctcactacatttgtacagaggtttgtactttccttcatagattttgttggaaccgcaataacattcaggcagtatcgctctctctctatctttgtcttagtgtataaattaataaactcagaaagtgttctgctttgtggttaagtattgctttggatacaatactattttctggtctttctaacaatcctttttcctttcatctctctgaatcagttttgtgcaaaacctcagtctctagctagcatctgtttttgtacattagattaatagcaaaatgaatcaagtaaagagttgaggtaaagatgaggttacatgaatactcattaccctctttgctctagttgtgacatttgtgcacataaattgaagctctggatgagcacaaatgtatatcgttttcaattgaagatccatgggcatatcttgaagagctagaagatctaaagtctatttaaaccatttgaagctcacacgtagcaaacgtcataaccttaatactcgggctctgccgacgaatacgagacagttataagttattgcttatcattctcgtgaaaatgggtgactcgccataaacacaacatacacacttaaagatggtgatgtaccgggacatgcagcataagataagtcactataagaacaatatacacactcagcttttcaacatggtacctaaacctaggcagcaattgatgtatcaaaatatatgaaatgatgctttccaatgtactaagtgcaactcatccataaactgtgatattacatgaaccgcatatcattactcttgactcgtaatcgtcagtgtcctggatcggtgtacagagagctagtatcggagaagaggtaataattttgttcaatccgtattccacaaagcctctatcttccgaagcaactggtcaaatagccttccctaacttataggcacaccccatcccgtactaaagtgaagagcgaacaatcgacatatgattgaacaaacccaaaccatacaagagtcgatgtgaactagtcgacccactttagctggatcagatgtttgaaacctcgcaaagagttttattatatttctttggacaaatctccatgtaataaacacaaatggacttctcaattcacacccatgtgaaacaattccttaacaccgttctaaggaatacattattcaccaaatccataatcccagaagtagacctcacttcatcaaaagactgataagaatacataattcccttcatattccagattgctgaaaacttaagcgggaaagagatttaacatcaaattaagtaataagttccgagttaaaagaatatcctcacacactttgatacaaagcatgaggcagacttagtgaattaagtggcgatccagccaccaacaacactcctgatataatgcttcttaagctttctccgtcgaatgttctttcccctgcgcattgtattcacttagtactccatctatgcagttactaagattactaacgtgagaaatagaaaacttaccagtactggttgtgtaatacaaattcatccgttgccactttcttcccatcatcattgcggttccagtggtatatagcgtgtgttcggttctttatatccagagtagagtggccatagctagcttcccgaaatgcagaataatctggctgtggttccgtaaacctgaaacaaaaagggcacattttctcatcacccaatactagtaaataataacaactctacagctctactacatatgagactttcgcaacttttattatcattctgatcagctctgtggatcttcatcagcggcttagctataggtcttattatacctcctagcctagaactgcgtgtagcagactagagctgttgtgagttgcttaaagagcagttagccaggtctggggttgtaaggatatctcggcagatcgttttcgggtgtgtattttctaggttgtggttaggcatttggtggagagtgtctctccttagtcaagtcttatagcgaattggaatgagaagcagttttataacatcgtacttataacattccaaggctcacgctttttgtgttccagtaatctaattgaatctgatcatgttactaaccttccagccagaccttcttgatttcctccgtctccaactgtgatataaacaggcgctgacttatctggaactgggtaacgatctccgcttgacacgttataccgcacatttgatattcggtactgagatggagaaacaaaacaaagattttactaaacacaatgaaacatatatattctatgcggagcttatggtaatacgaaagtaccgatctctcgtaggcatgaacatgcccagcaaagattacatcaactttgtgttggacaaaccactcctcaaaagctgctcgcatgctttcaccctccatgaaatgtgcttcattactgttgtatattgggacgtgcatcaaaacaattagccaaggtgttttctccctatcaactcttgtaagctcttcactaagccagtgccattgcggggtatacttcactgtacaacacacagaaagagtcatgcttaaccactcatttgggtaaatcttttacttataagaaagagtcatgcttaaccactcatttgggtaaatcttttacttataaagtaaagaacaaaaaagttagaagcaggggatgttgttgagcagttaaggtattaccaaaaggcgaatagctggagaggacaatgatatgagcagatgcacgcctaacagcgtaccaaagaggactgctactttttgaggctaagtaaggcgtagtgtaacgctgaaggtaattcctgaaaggtgtcacctccccctgtaaatgttttacatgtttgagaactcttaggagaagcaaaaacagaagtcaagcgcacaatcggaatagaaattacaagtaatagctataatgaatttttcattttcctgtcctatatttaatcatatcaaaattcatgtaaccagttcatttatatcttctaatcttcagcatactttcttaagaaccttttccattgatctgtctgagaaactgttaaaatgcaaaaaccgtagcagttcgaaccactcactattttaaattccataggagtcgaatttatgcataacctatatgttacttggctaggtagaaagtaagtataagatgaatcagatattaaccatgtatggcatgtaatctacttcatgatttcctgcagaccaaagccacggttgataagcggtactacgctccacaaaacgaccccagctatcccatctcacaccaacgtcattatactgatatctatcagcataagaaagatctccaagaaataaaacagcctgagctccactctccatgtaatgttccaacgtggataacgagttgaatgtctgacccatatcgcctacaattcgtaagtaaaactgagtttggctagtacagagctagagaaacaagtcaagtaactctcattgaaacaatactacaaactacctctgcaatgaatcttaaagcacagttgcatttagatcaaactactaacctataataccaaacttgtaggaagcatctggatgtacatgtggtggtgtaacaaaccaaaactctcgagaagattcaccgctttcaatcttgtaatagtattttgtatcatgctgataacaaaaaaagaaaatcagcatttgtatgtaatctaaccaccaaatataaaatataaactcagatacctcaaggtcagagacaaggcagtgatgaataaagccagacttatacttgtaaaacgtgtagttatggtaagtcccttgagcaacaaactcatatttcccctgaaccgcaccgtaatgtacttggctagaaccaggttcatcaggtgtaacccaagagatgataacagctttaccatcataatcaccttgagttatgtgtacttgttgtggtgcattatatccttttgggactttgaaaacatgatgatcaagtggtatatcaaccgcaggccattcagatcgaataaaactacttgtgattccagattctcctctatataacaacaatactgagctcaagaacacagagattatcaccaaatgattcatcacgtcaccaaatctcgactcagtttttttacctgtagccacaaagaatcgcgaatctgaatgttgatttcaaatctagaatgaagcaaatcttaagatacaatctgagaaattcgttgtgattttaagatctgaagaaatcgagagagaggttatggatattacctgagagatgaaggagatgacatttgggagattatcgtctcgatgacattaataagcccgtcggatatgtatgaatgagctatcgaagaaggtgaccacatacgtggagatttatgattggttgagggaaatggattgggtcttaagcattaaagtgcataacgtaaccttttaactaatttgatattcttagaaatagtttggtgtcaagaaaaagtttggactcaagacttccacgatatcgctggagaaaaagtttctaagagcatctacgacgcaaagtttttaatttgatttttaagtttaattatattatatatatatatatatataaaagtaggatataatacttcagtttcaaaaatataatagttcatgcggaaaaatataaaagaattgatttggctatatatgtcaccaaagagtagttatctttttcggtcaaaggttttgattcaaaaaagaatttcacagttatgagtgtttgaactggaatagttttatgatgggtgaccttccgataaatgattgtcggaactatgcgagtgaggataaagcaagagaaaatatcatgtggtaacaagtctttaaagcttctcggacgtggcataccgaccgtcggacaggggtgtgctcatggggctgagagaggacgtaggatccacatataggaacggtcggggcgttaaatagggcttcactctccttttattagtctattagaatagttattagcgtaaggcgcagcaagccggcaaagatataatggtgataagaaaaataaattaagaattttagatttattttagtgaatttaaaaagtgccaaacttattacccaaaatatatgaaatatttactgaaatgttatagaaagttggaatattgttagaatatcatacattctctaaacattacttatatattttgtgcaattgtgtaattaaaattaacactcttgattagttttttttaattaagattttttattattatttataactaaaaatgattaatgaaaattatgataatccacctcattaagaggaacgttttggtttccctccctgttattgtttcgcagcaaatttacatgttacggctgaattataatgctacacataagatgaaaggtcgcggaaatctacatattacggctaagttattacgaatatacatatttttcatagccttgttcgagaacatgtagctcagctttaactgatggctcaactcattcaaaccatagtcatcgaacaccaactttacaagcttatcgtgcgttctttccgcataaatttgcacaactcttcaccctctatcgttagtgttaaatacaaattctttacccagttaccacaaataacaatttctagaaccggattgattatatcgggcgaaggatgtaagaaaatgaaaaagaatgaggaagacgatgacgaattggaagttccagtgatgtgaaaaactcaggtgaaaaagacgagttgaaaaaaagatgtttcgtatttcttttaatgatgatgaaatgaaatgttacatcgacgtaattttttaattgatgaagtagcaagtaagccaccaaacaaacatgaaaatttgcctaaataaattagccattaaacaaaactagaagtcagccgcaacatgaatactattacagtaattaaaaaacaaaaaaaaaacgacaagttaattcagtcgtttaatgttgtaactcaacctacaatctttaactcatctgtattgtttaataagtcggtcgtaattgcttgctattaaagtaattaatcttttgctactaagtcagccgtaactaggccgagttatccgttaatccagctcattacggctgatttatgacactcgaacataaatcagttgtaaggacatcccataactaagccgtctttgataactcagccagtcgaaaaagttaactcaaccgtgtcaagagaataactcagccaaagttttgacaatcaaccattaggtaaaaactcagtcgtaacttaggctgggttattcttgaaattctcataactcagacaaatctctttaagtcagccgtaatgtaggttggattatctcataactcataaaaattttcattaagtcaaccgtaattctacgctcagttatactataagttagctgttttctcataactcagccattttttcttaaatcagccgcaacatatcgtaactcagccgtccctgccattatattattttacggctgagttcattaatacatgtcagcgattactgacgtggcgacgcggttttgctaacatggcaatgaaactgaaaaatcgatttggggatttagggatttgaagatttggggattttgagatttagggattgaaaaatcgaattgggattttgtggtttgtgttaagcacaaaacgacgtcgttttagataataacgaaatgattaacttctgttatcgtttctgttaacgacatataacgttgtggtgtttttggctttttggccaagtcaacgtttttgtatttgtaaaatggctggtcaacatttttgtgttgttttatttggccacatacgaaattcacgtattaaatggtcaacattatcatatacacatgatatatcacatgaacaaactaatattttaagtttagttatagatagttcaagattacctattacatatatttttatgggcacatatcgctagtgtacactacttaccaaaattcataatgcatgaaagtattttactaacggctaatatcgctagtgtacactacttatctcaccaacaatccatgagggtaaaaagtattgtcaccaaaaactatttcccaagattttctttcgatgaaactaaattaaaaggattaccgacttataaatctcttttattcaaattagaaaacatgcttatattgctcactaagatccacatctaatcaaatcaatgataatcaataaaatatttctaaaacactattaaaatctcgagagattgaaaacacataaaaataaaaaacacgttaaaaaaactgatcattgtaaagtatacggtcatcttaacacaagcaaaaatattaatccatcaacattggataaacagactaacaacatttagaatcaagcaaatctgaataaatcgaagagaggttatggatacctgtgttggataagcttgaaaagagtaacttgaggagtaagttattaaagaagagaaaaggaaattaagctttagtgttctaggagttatctagaataatgtatttggaaatatctaattacaaatcctaggatacatcaaggtgtgatagaacttatgagatttgagagagatcgagactttaggttttgagagagtttcctaaagatactaaaaagagagatattcgtttatacttgtgttcttaatctttcttgaatactagatttggtatcagagccttgcaacgatgtcagaactcgctgtttcaacgggaagaacaaaagaatctggagcatctacatcgattcaattccctatgcttaatacaacaaactatacaatatgggctttaaagatgaagatcgctctcaaggttcacaaagcttgggaaatcattgaaacaggagaaccgggtgaagagaataataatatagccatgcatctcttgttccaatccatacccgaggtgatgacattacaaattggaaatccatacccgaggtgatgacattacaaattggagagctgggaacagcgaagaaggtctgggacgcaataaaagaaaaacatgttggagcagatagtgtaaaagaggcaaggttgcagaacctaatgaatgaatttgatcgtctcaagatgaaagaatcttaaaccatctatgctttttctggaaaattgtctaagatagcttcaaagtcagctgctttgggagagaacataaaacagagaagttagtcaagaagtttctcaagagtcttccaagaaagaagtatatacagatcgtagcttctctctaacaagttttagacttgaaaaacacaagttttgaagacaatgtcggacgtataaaagtatacgaagaacgtgtgtgtgatgatgaggaagatactcaagaggatcaaagcaaactaatgtacactagtacagattcaagctaccatggagattcaagaaacaggggacgtagataaagaggatcctaaaagggaagaggacgaggacggaatggtggcagagatgcatcacaaataacatgtttcagatgtgataaacttgaccactatgcctcgtattgtcctgatcgattgttgaaattgcaagaaacacaagagaatgataactcaagtaccggatgagcttatgatgcatgaggtggtttatctaaacgagcaaagttgtgtgccaagcaaatttgaaacaatcattgatggagggaatgtttggtacctcgacaacgaagctagtaaccacatgacaggagatcgtaggtactttgattaaatagaccattctattacagcgaaagtacgctttggagatgattcacgcattgatatcaagggaaagggcacaatagctttcatagacttgaatggtcaaccaagagtgatgacaaatgtctactttattcctgatctaaagagcaacataataagccttggacaagctaccgagtcaggatgtgagataagactaaaggacggatatctaactatgcatgatcaagaaggaaagctgttagtgaaagtcgagaggtctaagaatcgtctatacaaagtgagaatgggcttgagaaacaatgaatgtttgtacttgacaactacaagtaactcaagtttgtggcatgcaaggatgggacatgtgaatcttactactctaaagtctatgatagacaaggaattggtccaaggagctccaagtctagtgattgagtcggaagtttgtggttctttcttacttgggaagcaaataagacaatcattccaacaagcgactgtctttagagcaaccaagaagcttgaacttattatacatggagatctttgtggtccaataaccccaagctggaaacctctatatctttgttctcattgatgactactctcgttacatgtggacaatgttgttaaaagagaaaggagatgcttttcacaagttcaataactttataactttggtggaaaaggaatctggagagaagattcaagccttcagaatagacagaggaggagagtttgtatctggagagttcaattctttttgtgaagagacagggataagaaggcatctcattggtccatataccccacaacagaacatcgtagtagagagacgtaacaggaccttattggagatggagagaagcatacttaaacacatgcatatgccgaatttcttatggggggaagtcataagacattctacctatcttttaaacagaatcgcaacaagagttcttacgtacataaccaccccatatgaatgctttcgagagaagaaaccattcgttgatcacatacggatttttggttgtacggcatatgcaaagatagataagcaacacttgaggaaactagatgatagatctcggatacttattcatctaggaacagagccgggatcaaaagcttatagactactcgacccacaagaaaagaaagtagtagtcagccgtgatgtaatctttgatgagacaaagggctggaattggacaagagagaactcaacacaagacggtgatggaagcttcaaggtcatgattgaagatttcgggactcatagacttcaagagacataagataatactgaaatagaccaaaatttagaagagaaaaaccagaatgatgagtccaattctgaaacaagtcatgaagtaatacaagaaacaacaaaatcaagtgaaagtgttccttctttaccagcattgagaagaacaacaaggcaggttagtaaaccaaaatatcttgaggactatgttttgcttacggaagaggaaggtgagatgttactcttagctttaaacaatgagccttgaagtttctatgaagcaaaagaacaaaaggaatggatatgtgcttgtgaggaagaaatcaactctagtgaaaggctaggaacatggaatctcgtggatttgccaattggagtgaaaccgattggactgaagtgggtattcaaactcaaaagaaactctgatggaagcataaacaattacaaggctcgtcttgttgctaaagggtatgtacaaaagtatggagttcatttcgaagaagtctttgcctaattgtttggtcattgttagacctaagttctgttttctagcttttgttacacattttgagagaagaatccaatccctttagagaggattctgaactcctttgctattattcttaattcatcaatgaaaagtattcagattatgatttgggtttctattgtcatgtctgagtaatcaccttgttgggtttagggagtctcaatagggatttagatggattagctcattcaaatttgatatagttcaaattgccttaagcttactccctcaaataaaagatcgtcgttagcacttaagggtcaaatttcactgagctctcgatgttcacacaataggctaatgatgttgtttaataagctaaatgaagtaattgaatgtaaaagacaaacaagcaagtaaatgagttgtagattaaagtgattaaagcgtcggatctaaggaattgtctcgggagatagataaattgtagatctagctaatattaggattgtttattgcaccgttctcgaactcaaactaagatcctattgtgtgaatatcgagagctcagtgaaattcgacccttaagtgctaacgacgatctcttatttgagggagtaagcttaaggcaatttgagctatatcaaatttgaatgagctaatccatctaaatccctattgagactccctaaacccaacaaggtgattactcagacatgacaatagaaacacaaatcataatctgaatacttttcattgatgaattaagaataatagcaaaggagttcagaatcctctctaaagggattggattcttctctcaaaatgtgtaacaaaagctagaaaacagaacttaggtctaacaatgaccaaacaattaggtatattcgtgactaaaaacgtgcaaggactattttgaaaataagaaaaacttcagggcttctcaaagacttggtagaaaacgagaattcccttggcagcaataagagtgtcgattgacacaggtgtggtgtcgatcgacaccagcttctgaaaaacgtccttcaagatcttgattgctgaaaagcttctaaaattccttattgtgctccgtagttcccagatgtgtaagtgtacctggaatgactcaaaacatacgaaaaagactagaaagactctaaaaaccattctgaaactatgttagaaatcagtaaaaaccaggacatatcaactcccccagactggcaagcaaaacaaaaggttgaatctgtgaaagaggtttgaaaaacatagaaactcccaatctctctagtttattaccttgatcatacaaactaaatccatgcagtaaacacttctaatcaaatcctgaccaccatgtaattctccgttagcccacgcaacattctagattccataccaaagctctcaactatatccactaggctatcatcgctgggtctcatcaatcacgtaaatgcttaagaaccttctagactcattcctgtactataccatgataaatcgaccattctttatatatatttttttatttggtgttctttctctcccccagacttattctttttagagagtaaacaaagaaaaactcgcatactggatcgacaccctcggcatttttccaacctttgtaattgatcgttccaaataatgtataataatggggtcataggaaacattcctacccctatacactatttgaaagtcttatcaatctctcgtaatttattattatattaaatttttttttctttatttggggagaggaacacttttttttaacacattagtcgatttattaggtatgaacaaggagccaagtcctatgagcactaaccgatttgatgaggtaaaaggaagagcagtgagattagctccagcctttgtggattatgttgggaatggatgtccttaagtttgttgatttgctttctggattttccattagtcggattgatttgaatgtgcagtacttaagcaatccaggcaataaactcgagagatagatcataatttcagacaaaagttttgactcaataaaacgactatctaagttaaaatgacacaactgactcataagaaaaaaacagatgaagttagtcactaactcccccagacttagataacactgtccccatatttattaagttagaggaatcgaaagagaagtaagcaaaagttaaaagttagaaaacgtgagttaccacctgagagtggtgtcgatcgataccatgttggtgtcgattgacactctggtcgtttcgcttagctttgtgaattctgcgcattgttgtagagccttagttagtgttttcacatggattctccagttagactgttaaatcagtaaaacacacatcaatagttccaacaaagcataagaaaataagtacaacaagtttcaaaacaaataactaatagtctgaaataaagcaaaaacaaagtcagaaaacaaagcaagataaggaggatggctagtcctcatgttctgagccggaggtgggtgcaggagagcgacgacgacgacgagtgggagcaacacaatcgcagcgagaaagtgtagctatggcgttctcgacgctcttgaaattgtcgacgcgtactgctgaaagacctgttgctccaatgggatgggtggaggagaaggcaactgatatggaagagcggatgaggaagatccaaccttcggacccccagcagggtcaatgaactcgtcctcggtttgtgtaggcgcagatcctgaagctgaaactctctgtcgccttgtgcgtggtttggcatgcagaagagaaggatcaggatgaaagcctatctcctcatgctctcctgtaatctctgtaagtgcagggcgaggtaaccgaatcatgtgctgacatgtatcatctctgaagcaccacattaagttgcctttaagcgagtgagagttcttccggtaagcctcatccataatgacacacgtggtgttgacttcttcgcccttaaagttgatgcagaaatgcttgaatatgggagtgagaagactgccaactctctcagatttctgtcctctacctataaagggcttggtcttgagagaaacaaagtgatgagcgaacacagccccaaagttgacattacggtcaacctgctcaaatccaaggttgtctagaaagaagtcatgaagagcattatagagcaataacaactcagaaagtctcatcttgccaggctccatcttgcacaacagtgtgctactaatcagcctaacaaaatatcccagaacagggtgacggatctctgagtgtactgcgtccttggaatcatagattccattaccaaaccagctccagaaaatctgagaatccttaaactgaccaggcagggaaactccagtgatatcattgtcaaacccatagatgtcacacaaatctcgcactggtaaactgtatctgacaccgcgaatgaagaagataagagctccttcctgagcgttgtgtttcctgtcattcacataagataccctaacagaagccatgaattgtttaaccagctcaggatacaaaaagtacaacctacaacagatggtttccaaacctatgtcatctagcagtcctaaaacagatttctctatctgcaaacactacatcaaaccgaaatccacaaaccgagtaggtaaaatttctacactcatccaggcattatagaacagagtatcataatcatcccaatatggagaaaaagggcaattgaatagtcacctttagtgaattccttgttgacatctttctcccaaaccctttgagaaggaattctctcatttggaagctttggccacggaaatcgatgaacaggaggttgaggggctgcagcttgggattccggttgggatgggaggagactggcggcggtggagaagcgctggcggtggtgagggacagcggaggaggaggaaggtctgacgctcttcctcgccttctttttctgccctgtcatcttgcagatcgataaaattgacacttgggaaagatagaggatgagattctattgagtttaaagcctgaaatcacaagaaacggtgaagaatcgaaggatctagagtggttttagtgaattcggcggttttagagagaaatgaaatgaagaagatgaagttttatgttaaaacaacttacctggaaaatgaaggtgtcgatcgacaccatctcgtttttggtcgacattattttattttttttttttttttaatctgcatagtcctataaaatcaaaaatcctaagttaagaatcaaatgaatgaaataaataaaaaggagaaacacttaccagtgggttgcctcccactaggcgcttgtttatagtcaataacttgattttgcagttgcttaatcaacaggtgggtcctgaagatccaaaggcttttctactggaatctcggcttcagcccagtagtgtttgactctctgtccattcacagaaaatggttttccattgttgtttttgagaatgactgttccatatggcctaaccgagtggactgtgtagagacctgtccaacgagaagataattttccaggaaatattatcaatctagaatcataaagaagtacctggtcattaggctcaaaggtccgagtgaggatcttcttgtcgtggtaagcttttgtgcgttccttgtagagcttcgagttgtcataggcgtgaattcgtatttcatcaagctcattcaactgaataagtctcttttctccagccgatttgatgtcgaaattcatcatcttgactgtccaagctgctttgtgcctttaattccactggaagatgacaagctttaccatatagaagatgaaaaggtgtggtaccaagcggagttttgaaagctgtcctgtaggcccacagtgaatcatctaacttgtaggaccactcttttttcgctttacccactgttttctcaagaatctctttgatttgcctgttagaaacttcaacttggtcgcttgtttgttgatggtagggagtagcaacccgatgctggactccatactgtaaaagcaatttcgcaagaatcttgttaatgaaatgcttacctccattactaatgactatgcgtggcactccaaaacgagggaagatgatagacttgaagtgtttcatgacaactgctgaatcgttctacggactagctatagcttctacccatttgaagacataatccacagctacgaggatgtagagattcttgttggaaggcgggaacggtcccatgaaatctataccccaacaatcgaagacttcgacttcgagtataaatttctgaggtatctcattatgcttgctgatctttccccttctctgacaagggtcacattgcaataggaacttatgagcattccgaaacattgtaggtcaccaaaaacctacttgaagaactttggatattggtttgaaggttgcaaaatgaccataatagccagagctgtgataatgcgatagtatatcaggaacctctgttgcagcaatgcatctcctctaaattccatcagaacaatgtttacagagataaggttcatcccgataatatcgcctaatctctcttaggaatcgcttcttgttgtaatctgtgaaattatcaggttccacatttgcagctaggtaattaacaatatcagcataccatgggtaatatttttcgactgctgtgagggcgcatttctcagttggtgaccaatttcttgttgattcagaagggtgtcgatcgacaggtgcaataatgtcgatcgacaccatcgcgcaactacgaatatcaacttcctctaaaatgggagtgtcgatcgacataatgggagtgtcgatcgacactgaagctcgattctgcaacctatcacgtttgtagtcatcttcttcagctgtatcaatcatgtatatgttctcttcaggcatgaaatcgtttatagggacatcatcatcgatcctaatgcgtgacaaatgatcagctacaccattcttaactcctttcttatctctaaactctatgtcaaattcttgaagaagcaaaatccatctcaaaagtctaggcttagcatccttcttttgcatcaaatacttcaaggcaacatgatctgtgtgaacaataaccttggatccaacgagataagatttgaatttctcgaaagcaaacaccacaactaacaactccttctctgtagttgcataattcctttgagcatcatcaagagttctacttgcatagtagatgacatgaagcttcttatccttcctctgtcctaaaacagctccaactgcaaaatcactcgcatcacacattacctcaaaaggtaaatcccaatctggtggctgatcaaggcttgttttatctgcttaaaggcatcatgacactcttgtgtaaactcaaatttgacttctttacagagtaaagcagtcaatggtcttgcgattctaatgaagtatttgatgaatctcctgtagaaaccagcatgtccaaggaaactcctcactgctttaacattatcaggcgcttgaagacttgtcatgacctcaatcttagctctatcaacttctataccatgctcagaaatcctgtgtccgagaactattccatcgtgtaccatgaagtgacatttctcccaattcaaaactaaatgtttctcctcacatctcgctaacactttgcaaagattctctaagaaatcctcaaacgatgatccataaactgaaaaatcatccatgaaaacctccatgatatcctcaatcatgtctgtgaagatagacatcatacctctctgaaatgttgcaggagcattacaaagaccgaagggcattctccgataagcaaatataccataggggcaggtgaaagtagttttctcctggtcatctggatgaatcgggatctgaaaaaatcttgagtatccattaagtaaacaatagtacttatgatttgctaacctctccaacatttgatccttaaatggtaagggaaaatggtctttcctggtagcagcattcagctttctgtaatcgatgcacatccgatgtcttttgattgtccgagtaggaatcagctcgtctttctcattcttgactactgtaacacctctcttcttaggaaccacatgaactggactaacccaactgctatatgaaattggatagataacccctgcttccaacagtttcataatctctttcttaaccacttctttcagattctgattcagccttctttgatgttcaacttaagacttagactcatcctcaaggtggatcctatgcatgcatacatctggagatatacctgcaatgtcatcaagagaacagccaagagctttgcgatgattgcgcagcttgcttagcaataaggtgagctctgcgagattaagagaagcattcacaataacatgataagtagaattttcaccaagaaaagcgtaccttaaccctgctggaagttgtttcaattcgattttaggagcctttgttggatcccaatctgaagtagtagtcggcgttgaagtcacagatggaagagcttcttcaactgtaagttgcatcacatgttcgctctcatctagcagcttagtatatgtagaagtttcactgtccaaatctgcattatcctctatggaagagaccaaaactcgctctagtgggtcttcttattcgatctctgaaatactatctgaagatgatgaagtgaaagaatctatcaaaaaggttttcccttctatgatcggtttcttgaccaaagtgttcatatcgaattgcatagtaaggtcgccaacattcagccctatcctcccttgttgaacatctatgattgctccagctgtgtgcaagaaggatctccctaggattaatggatccttaggttccttctcataaggcaagactacaaagtctgtaagaatcatgctctttccaattatcactggaacatcaataagaatttcatatggaattcgggtagaacgatctgccaacacaagagtgataaaggtaggctcaagattggaatacccaagacgcatagcaactgaacgaggcatcagattcacactagaaccgagatcacataaagctcttgggaaggaatcgtgattaatggtgacactaagtacaaaagttccaggatcaggtagcttttttggaatttgttcctgaatattgtcgctgccctgctctgaaatcatcataacattgcattctttcgtcaaattcttaatgaccattgtcttaacataccttctgattgtgggagatagatgaatagcttcaactagaggcatctcaacaatcagcttatcaatcatagccttgcatctgacatcatctaaggcttgtcttgactttttaggactcttggggaagggaattcgccgatttgctgacttggttgcagctagaatttgcacattgtctgaacgacttgggtgtcgatcgacaccatcaggaatagtttcctcctcctccgcaaaattatcgattccactcgacaaagggaaaacagagtcctcaagagttataggtgtcgatcgacaccctggtgtatcgatcgacactgattcattttctgcaattgggaaagatgaaggctgagctgatcgttcgcgctgaagtattgggttgagctgctttccgctgcgtagtgtgacagcattgatagaagctgatgtaggtgagagattggagaattgagagcggagattgtcaatcgtgctattgatatctatggagaaagaatcatacttgctatcaagctttgtggagagagattcatatttggtgtcaagctttgtgaggcctgcaagaagctgcgtaaacatagactccattctggtttctgattttggtggagggggggggcttggattggagcagaaattgctgaaataggagtctctttgctcgcagtagctatctcagctgaaattctttgttctttgtcaaatccctgcgttgaaagacaagttaatgcattggtgatgagaagtaaagcttcactaatggttattgtcatgaagttacaggagcttgctgcatcaagttgattctggtattgcttgtctattcctttgtagaatatgttgatgagttggatctcttggaagccatgttggggacattcacgctgataagacatgaatcggagccaagatgctctcagggactctactggagcttgggagaatgaagaaatttgcaaacgaattgtctctgtcacggattcatcgaagaagtgattcatgaatgcattcttcgtatcagtccaattggttaaggaacctggttccagttgacgcaaccatgatgttcctcttctcgcgagagagtaggggaagagtttgcaaagaaggtaatcagctggtacaccttcttctttaatagaggaaacgatgtattcgaagacttccaaatgatctaatagtgatttatcaggagctcctctaaactttcctctagatacaagatcataataggcagggtgtatagcaaagtcatctctttcaaaaggaggagcttgaatgctgatcggtttgtgtagaagagatcagttcttttaaaatcgcctattctagccgtctggtttttgcaggtgaaagtctgccatggaaacgtgattctcaaaccgataatgtatttgattgtgatttttgcagggggggggggggcttggattggagcagaaattgctgaaataggagtctctttgctcgcggtagctatctcagctgaaattctttgttctttgtcaaatccctgcgtcgaaagacaagttaatgcattggtgatgagaagtaaagcttcactagtggttcttgtcatgaagttacaggagcttgctgcatcaagttgattctggtattgcttgtctattcctttgtagaatatgttgatgagttggatctcttggaagccatgttggggacactcacgctgataagacctgaatcggagccaagatgctctaagggactctactggagcttgggagaacgaagaaatttgcaaacgaattgcccctgtcacggattcatcgaagaagtgattcatgaatgcattcttcgtatcagtccaattggttaaggaacctggttccagttgacgcaaccatgatgttcctcttctcgcgagagagtgggggaagagtttgcaaagaaggtaatcagctggtacaccttcatctttaatagaggaaacaatgtcttcgaagacttccaaatgatctaatagtgatttatcaggagctcctctaaactttcctctagatacaagatcataataggcagggtgtatagcaaagtcatctctttcaaaaggaggagcttgaatgctgatcggtttgtgtagaagagatcagttcttttaaaatcgcctattctagccgtctggtttttgtaggtgaaagtttgccatggaaacgtgattctcaatctgaaggtacctgaaacacaagagaccaatagacaaaaaaacacgtgaataggtggtagaagagtagtatctagacttaaaaggacacctagtctaatggtgaactaaaagagaacttcggcaacaacgccaaatttgatatagctcaaattgccttaagcttactccctcaaataagagatcgtcgttagcacttaagggtcgaattctactgagctctcgatgttcacacaatagactactgatgttgtttaataagctaaatgaagtaattgaatgtaaaagacaaacaagcaagtaaatgagttgtagattcaagtgattaaagcgtcgggtctaaggaattgtctcgggagatagataaattgtagatctagctaatattaggattgttatcgcaccgtttatgtcttacaaccggagggttttgaaaagttgggaaaagaagacaaggtttaaaaacttaacaaggcactgtatggtttgagacaggccccaagagcttggaacaacaagttaaatcatattcttgttgaacttctctttaagaagtgttctaaggagctgtctgtttaccgcaaataagttaaaggtaatctcctcattataggcatgtacgttgatgatttatttgtcactgagacacacttagaattaatcaatggattcaaaagggagatgtctgctaagtttgagatgagtgaccttggaaagttgacataatatctcggaatagaagtgactcaacacagcagaggaataatgttgaatcaaagtcgatatgctctcaagatcttagaagaagctgggatgaaagattgcaatatagttcctatggaaaccggtttgattttggaaaaattagagaatgaaaaggaagtgaattcaacagagtttagaagaaacgttggttgtctcaggtacctacttcatacacgacctgatctatctttttgtgtgggagttttgagtagatacatgtagagtcctagagaatcacatgcggctgccatgaaacaatgtttaagatacttaaaaggaactactacacttggtatatcgtttattcgaagcgtggaggtaccaaaattagtaggatacagtgatagcagccacaatatggatcctgatgatgggagaagcacagcagggcatgtgttttatcttggtaaaggaccaatatcttggtgttctcaaaaacaagatattgtggcaatctcgtcttgtgaagcagagttcatggcaggaacagaggcagcaaaacaggcgatttggcttcaagatcttttgagtgagatcacaggtgcatcaagtgagagtgtaaccatacacatcgacaacaaatcgtctatagctcttacgaagaatccgatcttccatggtcgaaacaagcgcatacataggagatatcatttcataagagaatgtgttgagaatggtcaaattgaagtggaacatgtttcgagagatgagcaaaaggaagacattttgacaaaggcacttggtagatccaagctcaatgaaatgagaaacctcattggagttcaagacttgaagggagaagagttcaagcttaagggggagaatgtaggataagcttgagaagagtaacttgaggagtaagttactaaagaagagaaaaggaaattaagctttagtgttctaggacttatctagaataatgtattaggagatatctaaatacaaatcctagttgtgttagtgatataggtcaaattgccttaagatcactctgtcaaataagagatcgattgtagcacttaagggtcgaatttcacaaagctctcggatcacacaatagaccaaggttttgaattaagctaagtaagatagtaatgaaaataaaaagaaacaaaaggaagaaatagcagattgtgaggttgtaagacaagaaagtaaaaacgtcaagcttagggtattctcaggatactattggttagtagatctaatactagctaggttattatcgaaccattcttaaactcaaactctaattatggaataaccggtggcgttccgtgaaactccctatgcctataactaagaataaccggagaaaccgagagatctttaacctaaaaatgtattttaaacgagttgaattgctcaccttagtagataggccgattcttattacacatctataaaccagcctcatcaaataatagattcaactacagatacctatggtgggcatatctattgtctggattcaagttctaggtgatcaatctatatctaacattaagaacaattaatgatgaagaattctaaacataacctagcaggggccgatctattaaaccatatgaatccctaatgagaaaccctaaacctaacaagttgattactcagacatgatcaaagaaacacaaatcatagtctgaataagaaatcaataatagcaagagaaagagtaaagaagatcttctcccaaagggagtctccacatggttttgctcctaaagtacaaaagtgatgaggagaatagtctctccaagcttaggtctaaacaatgacctttaaaactatatatatgacctaaaaaacgtgatgggccttctttagaaataagagaaagttctgccccgaatttggaaatcttcaaaacatcaataagttgcgtcttcgaattgctgtcaggtattggtgtcgctcgacatcaggggtggtgtcgttcgacacttacgtgcattttcgtctctggattgcttctgcagcttaagttgactattttgctccaaaatgctccataatctccaaatgcatcccaaacatgtaaagacctgaaaggactagaaaagactatagaaataacaaatagactctaaaacctatacctaaaacatagttaaaaatggtaaaaatagggatttatcagttaggataaggttaaagcttttaatatatagaatgtgttaaggtgtgatacaacttatgagatttgagagagattgagactttaggttttgagagagttccttaaagataataaaagagagatattcttttatacttttgttcttaatctttcttgaatactagaacctgaaagatgaaggagatgacatttgggagattatcgtctcgatgacattgataagcccgtcagatatatatcaatgagctaattggatatatatcaatgagctattgaagaaggtgaccacatacgtggacatttatgattggctcagtgaaatggattgggtcctaagcattagagtgcataacgtaaccttttaacgaatttgatatttttaaaaataatttagtgtcaagaaaaagtaattagtttgttctttaaagtatttggactcaagactcccacgatatcagttattgatatatcattactagagggttcgccctaagaaattgttttctctctcgtcttcctgccttaacacaaagtgtctgttctgcttggaaccggcgtgtggtggctcaaatagcgccggcgtcgatcaccttttttgtttctctgcttaattttttatttcttgtgtttaacttctttgtttgtggaagcatggaggctatacgatttggagtagtaggtgttgtgggggtagatctaatgaggctgggtcttggtactcagatgtgtcggatctgttggtcgatggtgttcttgggtcgtcgttctcgtttgctggtcacagagtggagtcacgtcgtcgtctttgtcgggtggttctctttgctaagtcttggcggactttggtggcttttgcttctctcttgacggttcatttctcttctcccaaagttgaatctgtacaacatcggattgcctcctcgatatctcggtatctccaatgtctctcatgtattcctatttcgtgtcaacttgttgctctgatcagttcgtctccgtgagatttggtaactgatatgattcaaattgccttaaacatactctctcaaataagagatcgattgcagtatttaaggatcgaatttcctcaaagttcttttgttcacacaatgaattgaatgtcaagattaagctagcagggaatgattgaaataaaaagtaagcaatgtaagagaacaacagatttatttgatgtgaaacgattaaaataaagagctaggggtagggtattctcagaaaatgattggttagtagatctaatgatagctagcttgttatcgaaccattcttaaactaaaactctaattatggaataatcggtggcgttccgtgaaactccttatgcctatagctaagaataaccggagaagccaagagatctttaacttaaacatgcattctaaaggagttcaattgttaaccttagtagataagccgattcttattacacacctataaaccaagttcatcaaacaatagatccaactaaagatacctattgcgggtatatctattgtctggattcaagatctagttaattattctagatctagcattaagaacaattaaagatgaagaattctacacataacctagcagggggacgatctactaaagcatatgaatccctaatgagaaaccctattcctaacgagcaaactactcagacatattgattgaaacaagcaacataattgagtaagaaagcacaaacacagcaactaagattagagtatgaaaggatctcttcacagtattgaaaactgaatgaatctctgaagaacaagggatgaatagcttatgtctctcaaagaaaactggatgaaaaacttgataaaaaggaacataggtctaaacaatgatgcaaatagggaagtcttttggagcaaatttccacttctgtaaacttaaaagcgtcatggacttttctgggccaaaactggtgtcgatcgacactcttactgaatctggaactgaaatcgtccttagctcgtgctccaaaatgtctcctcatatccattgttgtcccactgcatagaatacttgaaaagactctaaagagactcgagaaataacgaaaagactcaaaatcttaaatctaaaacatagataaaatcagtaaaaacagggttatattagtaacatcagaggtttaggtttaattggctccctcgtttgggatttcttcttccttgtttgggattatcttctctttccgactaagttaatctttgttagtttggggttgaacactttgattatgtttgggttttctctcatcgcgtagtatgcgatgttttgtttaatttattgatcgttttggtgttgaaaggtctaagtggttttccattatcttacggttcatccgggagacccttgaaaaagaagcatcatttatggagaaggccaaattccactatcttgttattgccataggttttgaagaagcccctcttcatagtttgttgtgcgggaagtccttgtggtgcgcttcgagagcttcgtttagtctcgagacaagatttgtttggtttttacaatgtattatcggaaaatcccttcctcatcttgttgtagattatgggtcgagcattgtgtctctttgaagtttaatctcttcttttctcatgtgtattgtaacctttccaaattcaatatcaatataattcagtgagaaaaaaagactcccacgatattgttggagaaaaagcttctaagagcatccacaacataaagtttttaatttactttttagatttaattatatactaaatagtttatctgcactatgtacgggataaaataattattaaataaatatattataataaattataaaattaactggataattatttaaaatttgaaatttgcttgtgtattatgtaaggggtaatgtaatatacttttttattttatttgaaacagcaaattttttgtatagaaattaatattacccatacattgattgatattaatatctttggtaatgataataggttttttagtcaattatcctaaaacaccaatcatatcgttgtagtattttaggttgtcaatccaaatgggtgtgatgctaacaatcaagatgtgatcagaagtcactaagtcaagccaagcaataacaggttttggtgtgttctactagtcctaagtgaacatgcagaaaacagaaaatcaaacagaaacagtaaaacactcgactaacacagctatttgcagaaattaagcgacagataacaggatgcagtaaacgacagtagagtaaacaaagaagtcaatcagataaggaattcccgaggatggggtaattgagtggttttgttttatcagtttacaggtgattgacatgctcaataaattaatcctagacaacaagttcattaaccaaatctaagtgccaccgcaaaagagactctcaagttaacctagtctcagactcaatcaccattgacgagagctaacctaacaggcattacgaatcaacaagttaaagccaaaacgctccctgcaaccaataccttggtacagggtcacgaatctctggaattagtggttcagacatttcatcgaacaccttttgggcgcggaaatgtctgggctcaaattccagttgatcagaaagcaataggcattaagaacaactaatccagaagggatctatcaaccaatactcaatcacctagcatactgagaattctacactactctaacccatcctctgaaacctattcactactcagacatcataacagaaagcataaacgttgaacaggttgaagacatgataacagcagtataacagcaggatgataacagaatgaacaacagtaaacgaaaatcaagaacaaaagctgaatactgaatactgaatagataaagagaaatccggattacaaaaagtctagaacacaaggtctgcggaaataaaactagataaaaacttcttgtgcgaaaatgtgaagtacatgctacttatagccaaatatcccgaaaccctaatactcaaaacgacgaagtattgggacgggttaggaactgtactcgacccatgtggtcgagtggtgggtcgagtgaacagctggagtcttcttttcttccttgtgctcgagtgtctggttgagtctggaatgaagaaggctctgaagcttgtcatcgagtatgcagtcgagtggtgtgatggtgatactcgacatccaggtagagtgttgaggtcttgtagaggtctggcaatgggatgaagttactcgacctgggggtcgagtgatgtgatcgggtggtggtcagaagatggagatgaagtcactcgacctgggggtcgagtgatgtgatcgtgtggtagtctagagatggagatgaagacactcgacctgggggtcgagtgatgtggtagagtggcggtgtcttctactcgacctgggggtcgagtggtctcttgagatcttgaagctcctactcgacctctgggtcgagtggtttgtcatgatcaggtctgcttcttccagttagctcgtcgacaactccaaatcacctgaaaacaacacaaatatgcaacaagcatgcaaaactatcctaaacatgcaaagtgattacaaatgatgtgaaatggtataaaacagtgatgatatgattctaaaatgatgacaaatggatgctccaaacatgcaaaatacacacttatcaggtaacatataattatttttgtttatcgacacaggtggtggtgttgattgacacccgtgctacaactggactatccttagtctgtctacaattcagctctacaatatgttccgagacaaccaatgtctaccttttgtcctcctgcttatgtggacccttgcaccgctcctcctgaatctctttcttagacttttgaggcattggacagggaattgtaggcgtgtagacttgtttagggaccagtggaaactcaaggctgataggtgcagcatgtgcccaatgtcgctcgacactaggtgagtgtcggtcgacactactttcaggtgttgactctctggtgtcgaacatactcgattcttcttcaacaattgtcgactagcttgtcatgaatctggtgtatcaagcgattctgtaaatcagcgtcaagcctggtcgattttgctttgtcacagcttgatttctcatatatatgtaatggtgtcgagcgatacaaggggttttgtcggtcgacactgcctctgcaacttcaaattcaccatcactttcctcaaccttcacgaactcataaaacatgatgctaagaagtcgttaggttgctgttagtccatctagggagaggtctctctaagatccgtcttctgaccttccagaatttgttccagtatttattctatcttgcttactagtgcgggtggagaggaagtgctttgtaagaagcaagatcataggttgttgtgaagctgaaattactgttaccgtgaaacggttgctggatatgagacttctaagtgtaacttgtcggaccattcccatagaaacctttgtacccttgttggtgttcaaatctctgattctgaaaacctcttccaccaacataatcgacatcttccacaagtagattgtggactgcgtcaagcttagccattaacccagcaatcttactctctttcatgttcttcgcttgtttcccgttttgcgattagacaaacacctgaaacacacaagaaaaagaagcgagaaagcgtaagtaactaaaaagaaaaagaaaaacaaaagcttagaataaattataatcctaatctaatggggaatcaaagagaactttgtcaacgacgccaaatttgatataggtcaaattaatcctgagaccactctctcaaataagagatcgattgtagtagtttagggttgaattccacaaagctctaagatcacacaatagactaagattttgaattaagctaaaaaagagattgtaaattaaaagacaagaaaacaagtagtaaatcagatggagaaaagcgttaggtttagggatattcgtaggcaatcgatgacaagtagatctaattatgactaggattttttatatctaaaccaatgttatcccccatctaaatactaggctcatctatgatagttctagcaataagtagactttcgcagtgtacctattacctatgatcaagttctaggtgatcaatctagaactagcattaagaaaattcaggatgaagaactctaaagatgatcctgacaggttggcgatcaactatataatctgaatccctaatggaaccctaaacctaacaagagaactactcatatatgattatagaagaacaaaacatgtttaaagtaaaaatcaataaagaacataagaagagaatagagtttagaagaattttctataaagggagtttcaaaagggttttgatcccaagcccaaccctatagacaacagtcagtggttctacgttctaatcacaaatttttccccaagtactttggtccttatcagattgttgacaaatgtggagaagttgcatacaagctgaagttgccagagtactctcaaatccatcccgtgtttcacgtgtctcagcttaaggtcttagtgggaaatgtctacaccacacatcacttaccttctgttctaccggacgtgtttgagaaggcacctgaagcaatcctggaatgaaagatggttaacagacagggtcgtgcagcaactaaggttttggtcaagtgggttaatgagccagcagaggaggccacctgagagtttctttttgacattcagaagaaatttccagcttttgtctcagcttaaggtcttagtgggagcttttgttgcttaaaaccttgaggacaaggttctgcaaaaggagggagatttgatgcaaaatccgcacatgtgagtgtacacgtgtgaagtcaagtggagaataagaagtatgttttgtcgacagaaacatagaacttagttttgcaattaaaaatgtttttggaggcctaattttgttactaaaaggcttaaactttttggaggtccaatacccatgtatcgtggatttgtgccaagggtcgggcctgcttgtccggctcatcattaactgagttttatttgtataaaaatttcaaagtttttttagcaaatcgtttagcttacaaaatgtaacgaactcatgctttttatatttacgctagggattaatctggccaacgctcgggctatgagtgtttgtatttttaatctgtatctcttgtataatttcttttccaattattattctccatttaaagaaaacatttatatgtgattttccacaataatggtaaggagagtaatatttacatgagaaatggagatgattttaataaaatgtatggtagcttgctacttgctagtattgttttgaaatttgattggctttttagtttaacaaaatgcatcttatgattgccgatggggattattttaacaaaaaaaacttatacttgtaaccttaggcaacgtttatcaagtggtaccgttaagatttgatacaatgtgatgaacaaaacttaaaacattaaaaataattcattcttttccgtagtacaataaatattattattgaaatatgaacatctcttagtaatattagacaaagtgaaagaggatgcaagcaagaagaagggtgcaaatggttgtctcaaaataagaagttgactccgttaaaaaattattcatctcatgttttaccatttgagatgaataatttagaaaagtcatttaacccattcaaccaaaaagttagaaaataaactaattacaaagaaaatttgttcaacttatttatctactatttcgcagagaaatgagctgaataatgtacaatttttttattcaattcaaaattttccaatcattcatctacatgcaacatttgcagccgaagatttcatgttttgtgggaaactcacaacaccagtttgcttggcatggtcggtgagcttttcttaaacagtttttgttgtattattccatgattgtagcaatcagtatctaatcagggtacttcttttcaattgttcaaaatctttgagcatggtttagagaggttggtcactgatgagttatgtgttctgccatccaattacatctgttttggctgagccattggatccaagaacatcgaggtgtgacgttgataactttggttgcatctaatgatacttatatcatcaaatcactgatttgataaatcatttggatgaaaatgcttcaagggaatctgttctccatgaaaaaatatgtgactgaaagaggaaaataacccgaatctattaaattacttagatcgatctgttgataaagcaatcaattagtttgatacatagaagttaatacatgttgaggtgggaaggaagaagaaacgattcagttattaataacgtgttcaaatgcaagatgacagctataggaaatatgacgtggaagggtttttctaaacttaataagtgtgctgaggtagccacctgtaagatgtttttcatgtgctgatgtggatacctggaagaaatgttaaagaaaacatgaattttcaaactgtgaatgtttaaaaactttcaaaatatcatttaaatgccaaagttgtagtcagattttagaattaaatagataatttttgttgattttacctttttgtgcatgttattaagtcaactgacgaaaaaatacctggtttaaatctcagattagaatttatgtgaacttaatgacatcgttttgaattaaaaattttaaggtggatttgggaatcaaaactgccactttggagatacatcaacacttcagtcccgactaagattctagattttgttgattatacctcaataaacttgacagatacaccatagcttttttttttaatgaccaaattaaagcaattcactgattttagatgatttttaatgtaaaaccaatttaaatttgtactcatatttcatttttggacagaagcataatagaaaggaaatattaaattttgagagatagtgtaataagtaaatttaggattttgtttctcttttgtttcaaaatttaggattttttacttttttgttaaagaatttaggattgatggatgtaaagtatttaagaaaataattattattttactaggatacaaaagtgtctatgttgactacttttggctttgaagttagaatttagaagaaaagattttaattactatttttttatttactaaacagctaatgcatttgttattaaacagctaaggcataaacaaggttttttcttagcgagctttattagttataagtgaaaaaataattttgataaaaaacatatatttttaaaatatatagactggtaataaagttttctttattggttaagtaaataaaaatccaaatttggattatgtttttaaaaattttataattagaactacaactcaattatataaagagactcttaaaaacatttatcatattttatactaaagttaacaaaatagtttttattttgaaaaaaaaatttaaacgtaagtacttaactataacttcaaatcttaaaaaatcctaagaaaaaagaataatttaataactctaaaatcttatcccaaaataaaagatgatctatttcctcaatatcaaagattttggccttttatacaatttatatttccttttttttatcattctatataaaatgcatcgtatacgtaatagatatcaactaaaaaaagtcttcgttttctccgccaaagcttgtatattgaaaagttttctcctcggtgtattaagggttgttaatgcgctcaaaaagaaaatggagatggtgtattagtcgagagcaaaacatattctaccaattttgtttgtgacaacttttgaataggattattgcattaccgtcaccaaagagatcattttcgatatttggattgaggggaaacatagccgaggtcaaatagtccgttgattactatcttatatcttcgtatatgatgggtaacatcgatgtcatacactaaaggttagttttaattgttgattttttcgattgttaatagcttatttttaatcggtttatgaacaagtatatgatttataaatagataaatcaatcaagttaacaaattgtaaattaatttaaacattttagatattttatatttcttgtaattctaggagttatctagaatattcattaggatttatctaatgattaggataatgttgaatctctattatataaggagttattgagatgtgataacccttatgagctttgagagagattgtgagattgcgagctttaggttttgagctattttcctaaagtaataaagagagtatttctttgtacattgagttcataatctttcttaaactctagatttggtatcagagcttgaggctattgaatcaatcataagagatgggtgatatcgttcccgtagataaaacaacgaaatatgttagcggatcctcttcaatccaatgtcctatacattgagttcatatctattatataaggagttattgagatgtgataacccttatgagctttgagagagattgtgagattgaaagctttaggttttgagctattttcctaaagtaataaagagagtatttctttatacattgagttcataatctttcttaaactctagatttggtatcagagcttgaggctattgaatcaatcataagagatgggtgatatcgttcccgtagataaaacaacgaaataagttagcggatcctcttcaatccaatgtcctatgctaaacgctatcgactacacggtatgggccatgaggatgaagagggcactaaaggttcataaagcttggaacgtgatagacaaggtgacagaaccgtttgatgaagataagagtgatgttgcttgtgctttgttgtttcaatcaatccccgaagcattagcgttacaaataggagaactggagacaacaagagaagtatgggatacgatcaaatcaagacatgtgggggtagagagagtcaaggatgctaggttacaaaccctcatggccgaatttgaccgattaacaatgaaggattttgagaaaatatgactttgctggcaagttatctgacatctcagcaaaatcagctgccttaggtgtaattattgaaaaatcaagacttgctaagaagttccttaagagtgttccacgacgaaaatacattcacatagtagctgcactagaacaagtcttagatcttaacaccataacttttgatgacatagttggtcggctgaaagtatatgaagaacgttgatatggttgaaattacctagaattactctctcaaataagagatcaattgcagtattttaggatcgaattcacaaatttcttttgttcaaacagtgagttaaatgtcgatattaagctagaagggtagtaagtaaacaaagcaagaaaacagcagattgattgtgttgtgaaagatttaataaagaggtagaaacatggtattctcaggaaactattggttagtagatctaatgaaaactaggttgttatcgaaccattcttaaactcaaactctaattatcgaataactggtgggtgtgccgcgaaactccctatatctatagctaataataaccggagaagccgagaaactatcaacctaaatatgcattcttaacgagtttaattgttcatcttacctgattcttattacacacctataaaccagactcatcaaataatagatccaactatagatacctatggcgggaatatctattttctggattcaagatttagttaattactctagatctagcattaggcataattaaagatgaagaattctacagataacctagcaaagggggcaatctactaaaccatatgaatccctaatgagaaaccctattcctaataagcaggttactcagacatattggatgaagcaaacaacatatttgagataaaaagcataaacacagtaaatagggaaagagaaagaagggatctcttcactgtatatagatctgaatgaaactctcaagaataatggatgaatagcttatgtctctcacaatagggttttgcaaagaactagataaaagacttgataaaagaaacttaggtctaaaaacaatatatatgaccctaaaaacgtccagggactaataatgtaaatagggaaatcttctggggcaaacttgagcttctgtaaacttgaaagcgtctagggtttttgctgggccgaaactagtgtcgatcgacaccaagagtgtgtcgatggacacttctcgctgattcctgaaccaaaatcgtccttagcttccttttccttagcttttgctccaaaatgtctctttatctccattgttgtcccactgcatagaatacctgaaaagatactaaaaaggctcgagaaataacataaagactcaaaatcctatacctaaaacatagataaaattggtgaaaatcggttatatcaactcccccagacttagcttttgcttgcccttaagcgaaacacaaaagccaaactcgtggaagaggttttgaaaacaaaggaactcccaacattcactagcttattgccatgatcattcaagctaagtccatatgcaaacaagtctaatcaaatcctaaccaacatgtacttctctgcaagcttacacaacattctagattccatacctaagttccacaactatacccaccaggctttcatcgctgggtctcatcaaacaagccaacattcaagatccttctagactcattcatgtactctaccatattgaccattctttatatattttttctttttcggtgttctttctctcccccagacttattctttttagagagtaaacaaaggagaactcgcatactggatcgacaccctcggcatttttccaacctttgtaattgatcattccaaataatgtataataatggggtcataggaaacattcctacccctatacactatctgaaagtcgtctcaatctctcattatatttatttatttatttattttttataaggggagaggaacatattctttttatcacattggtctcaatatcatgtatgaacaaggagtaaagatctatgaatactaaccgtttgaagaggtaaaaggaagagaagtgagattagctccagccttaatggttgagttggaaactaggatatcctcaagtctgttggtttgccatccagattttccaatagtcggattgactcgaaccagcagcactcatcaatcagacaataaacaagagaaatatagatcatgattcctaactaaactaaagaaaacctttttttttttttgggaaagaaaggaaagaaataaccaaatgagctgcaaaataagaaacaaaaataaaagcatcattagtaagaacctccaccatactgaaatgacactgtccctagtggcattcaaatccaaagaaagcgggagaaataaaataaaaaaaaaataaaagaaagggaaaagaaaaatcaaaccagtgggttgcctgccactaagcgcttgttttgagtcaatagcttgacttggcagagtttaggatgtgggtggagtggtggtggaggattgctgctgcctcatcgccttccaaggcggtgtgtaaacagatctggttggagcagtcagagcagcttccaaggcggtgtatcgatcgacactcatctcgtcacctacaaagacaacaggagaaacaagctttcgaggaactctagggttgttatctagtgaagtagtcttcgaataatctaaagaattaatcaaagataaaacaggagaagagagagaagagaacttatcacataggtccttaagtggtgtgggttgaagagaatgtgcagaatcctctgtctgtgaaacccgagggtgtcgatcgacaggggtagtggtgtcgatcgacatcgttgctctgcaactgtcattggtgagctgaacgtgttggagcgttgtgtgtggctctgtggtgggattttgatcagtctgaggaggtgtgtctttgctggaagcaatgcaactgataggtttaataagctctgaaccatccatgccaaactccatctccgaatcacaaaccttgagagagattctccctctcttcacatcaaacctagcaccagctgtagctagaaatgctcttccaaggataagaggatccttgggttccttctcatagtccatgaccacaaaatcagcagggataacagagttaccaaccttaacaggaacatcttcaaggattccttcagggattcgcttggaacgatccgcaaagagaaaagtgatgcgagtaggcctgtagtgagtcattcctagtctctcagcaacaaacttaggcatgaggttgatgcttgatcccagatcacacaaagagcgactgaatctgcttgtggagatagagcaatcaagaacaaagctacctggatcaggaagcttcgcaatggtctgaccaggagtaatggtgcagatgtactcagctatgtctactctctatgccttctccttctttgccttaggcagcatgattgcactaatgtctctggtaagcagcttagctttatctgagctaattccattgtcaacaactcgcttgacatacctgttgagtaaggcaaaagatgtctcaaaagtatctttaggaagaatatggaggatcttctccattatggctgagcacttagcagcctgaatctcctgcttagaatgacgcctcctcggataggggacaggaggagtgtaaacgggctcgggctacataggtacttggacctcacaaggtgcagtccggatccagtgtcgatcgacactagaggggtatcgatcgacaccgtcatattgagtcgtttctgagaaaagagtcccgtatggtgtcgatcgacacaggagggtgtcgatcgacactatctctgcaactgcgagcttcaactcgtctttagtgtccaattcctcccaaacatcatctccttctctgatgaagatggcattgcagctcttccttgggttagcatcaggattaccatgaagaaaaccctcttgtcgcttgatagattatgcagtttgagctacctgtacatctagcttcttcaagtgagagcttagattgtcgatcttcccattaagatctgtgtagacagcatcaaacttgccattaaaatccacaacaagctttgtttggctctctagaatctgctcaagcatcgattccattcttgtctctgttgagggtggaggggggggggggcttggtaagttgaatttctataggtcctctgaaagttgttttgaggaaaagtcctctggaaagcaggctttggagtgtagttggaggaaccctggttccctgtaaacctgttaccactgaagttgccctgtggctgcccaaacttcctgtatccctgaccatctatgtaaaaaactctttcctctgactcaggctcaatagtctcttcttcagctgcaaagtggacatgcttcttccctgtgagcaagttatgaactgaatccagcttagcattcacctctgccatctaatttcctgaaatagctccagcaatcttcttcctctcaaaatcagcattcttggtgttgttgctgcaagcaaggttctctatcagggctgtagcatcagctgggtaacgtgtgttgaagttaccatttcttgctgcatctagagccatctggtatctccaatcaactcctctgaagaaggtgcctagaagttgtacctcactgaaaccacgatgtgggcaatctcgttggtactccttgaaacgaacccaagcagccttgaaagcttcagctggaccttgtgtgaaggtagacagcttgtttctcaactcctcagacttagcatcatcgtagaaattgttcaagaaggctatcttgatgcttctctaagtcttgagggaacctgctttaagttgtttcagctaagaagctgcttccccatcaagtgaataagggaagagcttgcacagtaggtagtcctttgagactccattagctttgatgctcagaacaaggtcctcaaatcgctcgatatgatccattggctgctcatgagataagccatggaaaggatgctggccaactaaagcaaagtagccaggcttcagctcatagtcgttcctctagaatggtgggggtacaatcgctgatcgattagcatagaacaagtctagcctgttgaaatccccaagagtacgacgtggttccgcagttggaggaatagctgcaggaatctggtgttggtgtcgatcgacacctctgttgtgtcgttcgacaccgattgcatccgcgtgctgctcccgatggtgtcgatcgagacccacttggtgtcgctcgacaccgagccctcctgcatctctagcagctaattgcgcattaaggcgcgcctgatcctcattggcgtcctcaggtaggatgagtccatgatcatccaatctctgaccagcctcattgtaggcttgcccatcctcatctctcaaaactctttctgcatcagctctgatgactctgtcagccattgctaatttatgagtttttcggttggtgcgttcaagttttcccaagtctagaacagacaagttgataagctccttctgttttgtgctccttgtttgcctaggcatacacctgaaacacagaaaagaagaagacaagaaacgcgtgagtaacaaaatagaagtaaaaactagacgaaatctctaaacaaaactcaatgatgattcccaagaactccggcaacggcgccaaatttgatatggttcaaatgacctagaactactctctcaaataagagatcaattacagtattttaggatcgaattcacggagttcttttgttcaaatagtgagttaaatgtcgagattaagctagcagggtatgagtgaaatagtaagtaaacaaagcaagaaaacagcagattgattgtgttgtgaaagatttaataaagaggtaggaacagggtattctcaggaaactattggttagtagatctaataaaaactaggttgttatcgaaccattcttaaactcaaactctaattatggaatagtgggcgtgctgcgaaactccctatatctatagctaataataacaggagaagtcgagaaactatcaacctaaatatgcattcttaacgagttcaattgttcatcttagtaaataggccgattcttattacacatctataaaccagactcatcaaataatagatccaactacagatacctatggcgggaatatctattgtctggattcaagatctagttaattactctagatctagcattaggcataattaaagatgaagaattctacagataacctagcaaagggagcaatctactaaaccatataaatccctaatgagaaaccctattcctaataatcaggttactcagacatattggatgaagcaaacaacatatttgagataaaaagcataaacatagtaaatagagaaagggaaagaagggatctcttcactgtatatagatctgaatgaaactctcaagaacaatggatgaatagcttatgtctctcacaatagggttttgcaaagaacttgataaaagaaacttaggtctaaaaacaatatatatagaccctaaaaacgtccagggactaataatgtaaatagggaaacttctggggcaaacttgagcttctgtaaactcgaaagcgtctagggtttttgctgggccgaaactggtgtcgatcgacaccaagagtgtgtcgatcgacactcgtcgctgattcctaaaccaaaatcgtccttagcttccttttctttagattttgctccaaaatgtctccttatctccattgttgtcccactgcatagaatacctgaaaagatactaaaaagactcgagaaataacataaagactcaaaatcctattcctaaaacatagataaaatcggtgaaaattgggttatatcaaacgtttctttgatggacatgatcctcaagaagaccaaagtaaacttttgtattcaagtatggattctcaaggaagttactcaaacaatcgagatccagaaaacaattccaaagacagaggtcgaggaggaagaggatatcaaagagggagaggacgtggacgttcatatggaggaagagatacgtcaagagtaatgtgtttccgatgcgacaagttaggtcactacgcttcaacatgtcctgatcgattgttaaagctacaagaaacacaagaacatgataaagaagagacacttgaagcggatgagctcatgatgcatgaggtggtatttttaaatgagaagaattgtgtacaaagcatgtatgaagcaaacaccggagaagaaaacatatggtatctagataatggagctagcaaccatatgacaggggatataaggtatttttcaacattggatgattctattttaggcaaagttcgtttcggagatgactcccttatcggcataaaaggaaaatgatccattacacttgtcgacagaaacggtgatcaacaaaaagtatccaatgtctatttcattccggatcttaagagcaacatcatcagtttaggacaagctacagaatcaggctgcaacattatgatgaaaggagatcaactaacgatgcatgatcgtgatgggaaactacttgtcaaagcgtgtagatcgaagaatcgtctttacaaagtaagaatgggaataaaaggagctacacgtttgcacttaacaacaataagtgaatcaagtagatggcatgcaaggctaggacatgtgaactttgatacaattaaatcgatgatgcaaaaggagttggttcaaggattctcacttggaagcatagaaaaagaactttgcagctcatgtttacttggaaagcaaacaagacttgcgtttccaaaagccactctatttagagctgccaagattcttcaactagtccatggtgatctatgtggtcctataacgccaagcacaactgcaggaaataggtatgtatttgtgctcattgatgatcattctaggtacatgtggactattctgttaaaagaaaagagtgaagcttttaacaagtttagaaagttcaagagtctcgtggaacaagagtcaggagcaagaatacaaactttcagaacagatagaggaggagagttcgtttcacaagagttcaacaatttctgtcaagaatcaggaataaagcgacaccttacagctccatacacccctcaacagaacgaagtagttgagagaagaaacagaaccccattagaaatgacaagaagtattatgaagcacatgcagatgccaaattatttatgaggagaaggaatcatgcactctacgtacttgttgaacatgatagctacaagatctctacaagacaaaactccatatgaagcttttcaaaagaagaaaccaaacattgaacatctcaggatattcggttgtattggatatgcgaaggtggaaacaccacacttgaagaagctagatgatagatcacggattctagttcatctaggcatagaaccgggctctaaggcatatcgattgtttaatcctgagaatcaaaaggttgtagtaagtcgggatgtcgtatttgatgagacaaagagttggaattggaaccataaagacgcggaacacagtcacaacggaaacttcagtctcacaattggacagtttggaaatcacgagattgaaaacgaggctgagatagaggaaacagaacatcatgaagaaccgaacacgtcgagaacactgaagaagacaatgacaaaaatgatgagtttcagttatcattagacaacaattcaacaggagtagaaaaccaagttgtggctcaaccagatttgcgaagatcaacaagacaaagtttcaagcgaaaatatctcgatgatcatgtgctgctcgcagaagaagagggagagagacttctgttatgtctgaatcatgaaccctttgactttaatgaagcaaaagaatccaaagagtggatacaagcatgtgaagaagagatccattctatcactaagaatgatacttggaatcttatggaacttccactaggagttaaaccaattggtttaaagtgggtattcaagattaaacgcaactcagacggaagcatcaataagtataaggctcgacttgtagcaaagggttatgtgcagaaatatggagtcgactttgaggaagtgtttgctcctgtagcccggattgaaacaatgcgtctccttgtcaaccttgcagcgtcgaatggttgggagatacatcatcttgatgttaagacagccttccttcatggtgagttaaaggaaactgtttatgtcactcaaccggagggattcaaggagaaaggtcatgaagataaagtctacaaactcaacaaagcgttgtatggtttacggcaagcaccaagggcatggaacaataagttgaatcgagttcttaaaaagcttaaatttgaaaaatgttattaagaaccatcggttaatcgtaaggtaatgagtgagaatattactcttttagtggctgtgtatgtagatgatctctttgttacgagaacaaacaccaagatcattgatgattttaaaagagagatgtcatccaagtttgagatgagtgaccttggaaagctaacctattatcttggaattgaggtatgtcaacatgaagaaggaataacactaactcaacaccggtatgctaaacgtatcttagaagaagctggaatgttagattgtaacttggttcacacacgaatggagtcgggtttataattaagcaaatctgtagaagaaaatgatattgatgccacgagattcagaaagaatgtgggttgtcttcgttatttgttacatacaagaccagacttaaactattgtgtaggaattctaagccgttatatgcaaaaaccaaaggagtctcacagagctgctatgaaacaatgtttaaggtatgtaaaaggcaccactacacttggtttaacatatgggcgtttcacttctacgatgccaaagctggtaggctacaatgatagtagtcataatgttgaccgcgatgatggaagaagcacggctggttacatattctatcttggagaaagctcaagtctgatttcttgttgttcacagaagcaagacactgtggctatgtcatcttgtgaagcagaattcatggctggaacagaagcagcaagacaggcgatatggcttcaagacttgctttatgaggtcattggtttaccgtgtgagacggctgtagttcgaatcgacaacaagtcggctattgctttaaagaaaaatccactgtttcatgggcgcaacaaacacattcacagaagatatcacttcataagagagtgtgttgagaatggacacattgaggtggagtatgttcccggagacatacaaaaggcggacatcttgactaaggcacttggaagagttaagtttcaagtgatgaggagtctcattggtgttcaagatttggagaagagtgagttcaggcttaagggggagaatgttgattaagcttgaagaagacttaagcaataagtcattcatttatttaagatataaggagatccttgtaattctaggagttatctagaatattcattaggagttatctaatgattaggataatgttgaatctctattatataaggagttattgagatgtgataacccttatgagctttgagagagattgtgagattgagagctttaggttttgagctattttcctaaagtaataaagagagtatttctttatatattgagttcataatctttcttaaactctagagtttattggatatttgatgtccgtatatccgttataattcggataatcggtcggaaaattcaaaacattcccaagatagttgtaatatttcataaaatatgttttacttaaactctgttctgctcaaattagactttgcatagttgtgaagcattatttgctcaggctagactagacttttcaggaaacaaacatgaaaaaaaatgttaataacctcccttatgttttcctagtaataatatcccatcttgtaagtggcgtcttgatacaaacaacaatcttaagaaagttcatcgttatactgatgtcaaggataacaagtgaatgaacatttaagagaatgtccctacaatcaatttatacttctatttgtacttctacaatagatgtttggcttatagaaaaaatgtttaatgaattaaacttcactgacgttctattgctcgacttctacgtagtagacacgaatacatgatagcatttaaaagttcttaagcaatatcaaacacagaccggaaaataattatcttgggatcaaagcaattttccaacttggtatttagtaacagaaactttgagatagttgtagaagacattatcttaaacatactttcacttgttatttttgataaatgaactaatccccaaaaataaatagatgaggattcttaaatttgttgtttgtatcaaaagacgtcacataaagttttattcaccagaaactcgatgaacatacaatagaaaaataaattgtgcgtagacgtcgaaacgctggaagaagaggcaaaagaaagagaaggtgtagactactctcaactaaagctaaatgaagagcttattgctggtggcagctggtgacagaatggcaaaccccagccagtttgagggttcaatgatgttgccactgtgcccaaacatgttccagcagcaactcaacatcattgagtttaatcagcaacaaccactaaacccaaacacgttccataaacaatgcaacatcaatgagttcaatcagcagcaaccattggatctaaagatgttccaacaacaatttaacatcaatcagttcaacaagcaacaccgaaaccaagatttttatggacaactctaaggaagttgacgtggatttgggaatcatatttatgtaaggattgaagatttattcaagttgttttagtttacgtttaaaaggtcaggttaagagagaagcaaatctatctaattgttcttcttagatagatccgtgagagggttcagactattgtgacctttttttttttttcaaaaatgttgagcttttctattgagacttttttttctattttattcaatttgttaaatttcattgaaaaataatatgaaagtagtcttctgaaatgttctttttccgactagttgatgattgctttggtcaacgtttcaaagaatcataatttgctttagttcctccttgaagaaaaggtcaacaaaaggaagaattaaaggaaaatgtgactctttggaacattgaccaaagcaatcatcgaatagtcggaaagaaggaacatccgagaagactactttcatgtttttctatgaaatttaacaaattggataaaatatagataaatctcaataaaaaggaaaaagctttattgaaagaaaaaaatctgtcacagttgtttcaaccctttcacggttaaaatcatatatctatctaagcgtaacagttagatagatttgtcactctctcaacttgaccttttaaacataaaactaaaacaacttgaataaatcttcaatccttgaaccaataggattgccaaatccacctcaacatcctaagggttgtccataaaaatcttggtttggctgctcctggttgaactcaatgatgttaagttgttgttgaagcatgtttgggtccaatggatgctgctaattgaattcatttgatgttgcattgttgatagaacatgtatgggtccaatggttgttgctgattgaactcattgatgttgagttgttgctggaacatgtttgggtctaatggttgcattattgaaccctcgaactggcaggggtttgtcattccctcaccagcttaatactgtttacttcagcgatgagttcttcatttagcttcagttgagagtagtttacactctgtcgttcctttgcctccttttctagcatttcgatttctgcacacaattgatttttgtattcctagttcattaggtttcttgtgtattttgttagattttattaaatcgtatgtttctttttcttcttctctcactgaaaaaatatttcaaaattgaattaatgtagcggacaatgaactgatggacggactatcatcctagactatggttagatatatatatatatatatatatatatatatatatatatatatatatatatatatatatataaggtcttaaaaacgtgcacatacttctttgaatataggcagaatttctaaggcgaatctacaaatatgcaaatcttcaatactttaataaaacgcgaaatcgaattgtcgtcaaatattagtgtcaagcgtcaccaggggtggtgttgatcgacagttacgccaattttggtctctggattgcttctgcaacataagtcctctgttttgctcctaaattctccataatctccaaatacatctcaaacgtataaaacctggaaagtactagaaatgactctagaaataacaaaaagactctaaaaccagtacctaaatcattactaaaatcggtaaaaatcgaggtatatcatcctgcgaataagttagcacatttgaatggtaattttgatcatatgataggttcatcgttccctacatcatctttggcccaatgatactttgaaaacaaaaaaaaatgttttgttaaaacgtattgatgtaaaagtggaaaaggtctcaactcaacaaaataaagagtagcattagtagtaaaggattcattaacccccagacttaaatcacactacctttggtaggaaaaataaacatagggatgactctgtaagaaagataagttaagaacaatgtcactttgattgtggaggcaaaccgtatgatgtttctacttgcttaacaacgacttagctcggcttagtttggtcaaattccaagatataaatctctattcgcatcttccttgaaacaaaaaataaactaaaaccatcaatagtattaacaaaacataataaataaaaacatactgataacatcgtattttagcacacttttactatgttttttttaggttttccatggaaaaatcaggagttaatggatacttcaaggcatatttcgagtatttgagcttcaaggaagaataatgagtttttatgcaaaaagaagtagaagtcgacaaaaatccgtttcaagacaatttttgtgcctcagatgaagacgttcaaaagttatggcccgaagagtgaagacatgtcctagaatcgcggttttggaaataatcaatctaaaaccgccgaccgaagagacttgaacccgggcaagaaaaaagggcaagagaagaagaagagagaatggtgcgtgaaatgagaggaatggccgagtattaataattcgcggaagccagagaagagcccaagtctcgaaaatgtggagccgaatccattcgggcagagacgacttggtgagcaagttttgtcccgagcgatgcaagccaacttcgaacccacgccttagccaacttggagccgaatccacccgggcgagccaacttggtgagcaagtttcatcccaaagccgacttagtgaccaagtctcatcccactccatatgtccgaaccttgagcctataaataggaccttaacccccttagttaaaccttagaagctttcgcaccaaaactctgcccaaaccgagagagaaagaaagatcgtctgaaccttaaaaccacccaagagagagagagatcgtccgaacccttaacccgagagagagagagagagtccaagctagagatcgtcgagccttaggatagtccgagagagtgagttccggtttttgttttgcatgtttgattttccttcttgcatgttctcgattctcccttctcttagttttgtggttgttgtggttgagtttgttgaggttgttaaccgaatagctaggattgttgaaaccgaagcaccttcccctataggagtggttgtgatagaatagcaccattcgcttgagagggatggttgcgttgtcaagacattactcgctagtattcgggagacttttagagagaagtttatgaacatgtgtgttgaaaacgaaccgcatgtttcatagtgttgattggaagatcgtagtgtgtggagcttggagagtatccaagttaacgacataagcatgctacggttaagtgggatgtatctgaccttgccttgtgattccgttctttcgtggggtgtgcttgacgagatgcaagtgacctcaaggggttcgaaagacccggagagactgggttagctacccaagggccggtgtcgcttacacgacggtgtagccaaggtgatgctccggttatatgcctttgtggttataattcgggtgttcacgatgtgctgaggaaggcagtgcattcgggtcctaattaaaactttaagaaacgttatcttcttgttgtgttgtgtgttgcttgctaccttctctgtgtactctgattatttatgttatgcatgtgggattatgggtggtgattagactaatgtttccttggggaacccgagctcattgagtaatgctagattactcatgactctacttgttttgcaggtaaccttagaggggattagagggagtggtgaacactagggaacccgcagtagtttttcagtgtccttttgtataacttaaagtatgtattttcgtatcatgtacttttgggcctcatgccttggccataaaaacgatgtttatgttgtgatttttccttgtattttcgtaactctatgatattgaaatcggtatttatttaaaattatacgggtttcaaactgataaaactttgtccgagtcgacacaacatttgggtgaagtgagggttggcaagcctaagtggatctcaaatggggaaatgagtaaccttaagtgggctaaagatcggaatgtgtttctgaacctcggctactctatgggaattcatttccattgtggtgtctccgggccgtgccggactggccgagttctagtacggaccgggggcgttataacaggaaggtatatgagcatggttttgatgcttttgggatccggtttttcaaaagttttatcgagtaaatagtcgcaaaagacacataggataatccgggtcgttcaccactattaggatagaggggggaaatattagaaacctaagatcgttgttggattggatgcagatatcaaggcaagggtcggacgagaaccagtagagagatgtgatgtctagtcgtggaaaatttgcgcagtatccggagtcggataattggataccgagtgagagtggtgagataaacgaagattatattcacttggagccgtatggattacctgaatgggaaacccccgattccacgcccagacactcgccgcccggatcgatgttcttcgaaacatcaaatgagagttacttgtggtcccgttcgcataaccccgtactatccccatcgattgagcaaaatcatggaaaccctatccctggaaccgagaataaaggagcccctgaaacgcgacagaccttaggcattattcagagtctattgggtcatatgattcaaacacaacaacatcaacaacaaattcaagaaagtcagcgagaggaatcaccatccgcaaagttcttgaagctcgtaatgatgatgagagacttaggaattcgcgtgtttaaaggagaacaaaacacggtcgtgacagataaatggctacgagaccttgagagtaattttgagatttctcgatgtcttgacaacttcaagagatagatcgcagttaacttcttggacgaggatgcacaaatctggtgggagagcgtcactaccaggaaccaagaccaaatgatatcatgggaagcttttagaagagaattcgaaaagaagtactttccaccagaggcccgtgatcgattggagcagcaattcatgaacttagcacaagaggcaaggagtgtccgatcatacgagcaagctttcacgcgactaaggaggtacttatacaacggacaagacgatgaagcattgatggtgcgtagattcttgagaggactcaggccagagatatggggccgactacaagcagtcacatatggcagtgtcaacgagttaatcgaacgggcaattaatgtagaggagggtattgagttggagaagagtgtaacaaacaaggaaagcgatcgatcgggagggaggaagactaataacacggagaccaaaaacaacgcttctaaattcacactaaatcaggagagagactatgtcgaggaagaacaaaggctagctataacaacgataagggaagaaacgattttgatccaaggggatgttacacatgttgaaagttgggccatttcgcgcgagtttgcccagtggttacccaaccaacggcagtgtatgtcacatgttattcctgcggtgaagaagggcatcgttccaatgtttgtccgagtaagaagacaggccaagtgaatccaaagggccattgttattggtgtggaagccaagaccactactctcacgtgtgtccaagtaaacccacgggacctgacactcagcacaactcacgacccccgccagcatcaggagaaagaggacccccggcgaaacgtcaggccacggttgctaacgtgtacgcgtcagatttagaatcgacagaaaccacaggacctcttaaaggttccgtaataggtttgtatgggttctaactctttttttaaagtagtttttagattttgtgtgtgaattgtgagaatgttttggctagtgtgcgtgaatgcgttgccagagactgtaagtattggtggtgtacccacatgtgtgttatttgactcgggagcaaccaatagcttcattacgcctgaggtggtcgcaaagttcaccacaatttttaaggaaaaggaagttaatatccttatccataccgcgagtgatcaaccaccccttcaaacccgtagaatcctattaggagtacccgtagtaatccataggacaaccttacccgcaaactttttgattatgcccatgaggaagtttgaggtgattttgggaatggattggttatccggataccatccccggatagagtgtgctaagagtagagtggtgttcgagttaggagaccaaaccaaattagtctataccggagggagcctgagtgtcagagcagtttttgaatcagccgttcatgtcgagagtatgctaggccaaggggaagcatatctagtaacacttaacgcggttggaggagacagtgatgaggagatgaaagtggaagacattccaaccataggtgaattcgtggatgtgtttggagcattagaaggcttgccaccgtcccggagcaatccttttgccattaatctcgaagatggagctattccgatagccaagtccccttagagaatggcgcctgccgagttagcagagttaaaacaacatttaggagatcttcttgaggaaggattcatacgcccgagttcatcaccatggggagcctaggtgttgtttgtgaagaagaaggatgataagttacaagagatagttacagagttgaaaatgctagatggacctaatgctagcggttatcacatggcggacgatggtactctgttattcaacggaagaattacggtaccagatcgaggaaacttacgacaagagatccttcgtatggcgcactcgtctacactaagtattcatccaggcagtaccaaaatgtataaggacataagcagatattatcattggccaggaatgaagaaatcggtagctaaatgggtaagtcagtgtgattcttgtcagcgaataaagattgatcctcaggttccagctggagtgctttagagcttattagttccaatgtggaaatgggaatcgatctctatggacttcatcaccggattacctacaaggaaggggcagagaaacgatttagtttgggttattgttgatcgattaaccaagctgactcatttgataccagtgaggagcatcgatcaagctccaaatctcgcggagaggtataaaaagaagtgatcaagctccacggtataccagccaatctcgtgtcagatcgagatccgaagttttcggcaattttttggcaagatctccagaaggccctaggaacggatgtccacatgagtacggcgtttcaccccgagaccgacggacaaaccgagcggacaattcgaaccattgaagacttgattcgaatctgtgccttagaatggggaagaagttgggaggagaatctaccattcatcgaatgttcttaaaacaacagctaccattcaagtattggtatatcaccattcgaagctatgtatggaagaccttgtagaaccccgctctactggatggaagtaggagaaagaaccaaattcgatcaatggatagttgatgaggcggcagagaaaatccagttcatacgcgacaacatgaagaaggcacaagatcggcagaaaaagtacgcggatcggaaaagacgagaagtagagtttcaagtaggagatatagtctacttaaaggtcacaactcaaaaggggaaggattgattcggaaagatagggaagctggcagtacgttatattggtcctcatcaaattgtgagtcgagttggtgaggttgcatataagttagatatgccagagatcatgcgacttaacaaggtgtttcatgtgtctcaattaaaagacatgttccaaatcctgatgctgtaatttctgaaccgatacccgaattgaagactaacctcacttatccggaggggccactcgagatcggagaatggcacattcgaaagttaaagcaacggttaattcctcaagttcaagtattttggggaaaacaaaaccgacgggtaactacatgggaggatgaagaaaagttccgtgcaaaatatcctcgactagtcgacgctgaagaagaagatgacaatgaagccggtccatccaatactcagggaattcgggtcgaattcctataaggaggggcgaatgtagtaccccgcgcattcacccggggcaagaaagaagggcaagagaagaagaagagagaatggtgcatgaaataagaggaatggccgagtatttataatctgtggaagccagagtagagcccaaatctcgaaaacatggggccgaatccattcgggcagagccgacttagtgagcaagttttgtcccgagccatgcaagccaacttcgagcccacgccttagacaacttggagccgaatccacctaggtgaggcaacatggtgagcaagtttcgtcccaaagccgacttggtgaccaagtctcgtcccactcctcatgtccgaatcttgagcctataaataggaccttaacccttgtagttaaaccttagaagctttcccaccaaaacactgcccaaaccaagagagaaagagagatcgtctgaaccttaaacccggagaggagagagatcgtccgaacccttaaccggagagatagagagagagtccgagctagaaatcaccgagccttaggatagtccgagaaagagatcccgagtagaaaccatcgatcgagttaagaagattcatcggtgattgtgggttccgtttttgttttgcatgtttgattatccttcttgcatgttctcgattctcccttctcttagttttgtggttgttgtggttgagtttgttgaggttgttaaccgaatagctaggattgttaaaaccgaagcaccttcccctataggagtggttgtgatagaatagcaccattcgcttgagagggatggttgcgttgtcaagacactactcgctagtattcgggagacttttagagaaaactttatgaacatgtgtgttgaaaacgaaccgcatgtttcatagtcttgattggaaaattgtagtgtgtggagcttggagagtatccaagttaactccataagcatgctacggttaagtgggatgtatgttaccttgccttgtgattccgttctttcctggtgtgtgcttgacgagatgcaagtgacctcaacgggttcgaaggacccggagagactgggttagctacccaagggccggtgtcgcttacacgacggtgtagccaaggtgatgttccggttatatgcctttgaggttataactcgggtgttcacgatgtgttgaggaagacagtgcattcgggacctaattaaaactttaagaaacgttattttcttgttgtgttgtgtgttgcttgctaccttctctgtgtactctgattatttatgttatgcatgtgggattatgggtggggactagactaatgtttccttggggaacccgagctcattgagtaatgctagattactcatgactctacttgttttgtaggtaaccttagaggggattagagggtgtggtgaacactagggaacccgcaatagtttttcagtgtccttttgtaaaacttaaagtatgtattttcgtatcatgtacttttgggcctcatgccttggccataaaaacgatgtttatgttgtgatttttccttgtattttcgtaactctatgatattgaaatcggtatttattttaaattatacgggtttcaaactgataagactttgtttgagtagacacaacatttgggtgaagtgagggttggcaagcctaagtggatctcaaatggggaaatgagtaaccttgagtgggctaaggattggaatgtgtttctgaacctcggctactctatgggaattcatttccattgtggcgtctccgagcagtgccggactggccgagttctagtgcggaccgggggcgttacaaagagtggtatcagagcatggttttgatgcttttgggatccggtttttcaaatgttttatcgagtaaatagtcgcaaaaggcacttaggataatccgggtcgttcaccactattaggatagaggggggaaatattagaaacctaagatcgttgttggattggatgcagatatcaaggcaggggtcggacgagaaccagtagagagatgtgatgtctagtcgtggaaactttgcgtagtatccggagtcggataattggataccgagtgagagtggtgagataaacagagattatattcacttggagccgtatggattacctgaatgggaaacccccgattccacgcccaaacactcgccgcccggatcgatgttcttcgaaacatcaaatgagagttacttgcggtcttgatcgcataacctcgtacaatccccatcgattgagcaaaatcatggaaaccctatccctggaaccgagaaccaaggatcccctgaaacgcaacagaccttagacattattcagagtctattgggtcatatgattcaaacacaacaacatcaacaacaaattcaagaaagccagcgagaggaatcaccatccgcaaagttcttgaagctcgtaatgatgatgagagacttaggaattcgcgtgtttaaaggagaacaaaacacggtcgtggcagacaactggctacgagaccttgagaggaattttgagatttctcgatgtcttgataacttcaagacacagatcgcagttaatttcttggacgaggatgcacaaatctggtgagagagcgtcactgccaggaaccaagaccaaatgatatcatgggaagcttttagaagagaattcgaaaagaagtactttccaccggaggcccgtgatcgattggagcagcaattcatgaacttagcacaagaggcaaggagtgtccgatcatacgagcaagctttcacgcgactaaggaggtacttatacaacggacaagacgatgaagcattgatggtgcgtagattcttgagaggactcaggccagagatatgggaccgactacaagcagtcacatatggcagtgtcaacgagttaaccgaacgagcagttaatgtagaggaaggtattgaattggagaagagtgtaaccaacaaggaaagcgatcgatcgggagggaggaagactaataacgcggagaccaaaaacaacgctcctaaattcacaccgaatcaggagagagactatgatcgaggaagaagaaaggctagctataacaacgataagggaagaaacgattttgatccaaggggatgttacacatgtggaaagttgggccatttcgcgcaagtttgccagtggttacccaaccaacggaagcgtatgtcgcatgtttttcctgcagtgaagaagggcatcgttccaatgtttgtccgagtaagaagacaggccaagtgaatccaaagggccattgttattggtgtggaagccaagcccactactctcacgcgtgtccaagtaaacccacaggacccgacactcagcacaactcacgacccccgccaccatcaggagaaagaggacccccgacgaaacgtcaggcgacggttgctaacgtgtatgtgttagatttagaatcaacagaatagttgagaccgaagcaccttgccctataggagtggttgtgttagaatagcaccattcgctttagagggatggttgcgttgtcaagacactactcgctagtattcgagagacttttagagagaactttatgaacatgtgtgttgaaaacgaaccgcatgtttcatagtgttgattggaagatcgtagtgtgtggagcttggagagtatccaagttaactccataagcatgctacggttaagtgggatgtatctgaccttgccttgtgattccgttctttcgtggggtgtgcttgacgagatgcaagtgacctcaagaattttaaagacccggagagactgggttagctacccaagggccggtgtcgcttacacgacggtgtagccaaggtgatgttccggttatatgcctttgtggttataactcgggtgttcacgatgtgttgaggaagacagtgcattcgggccctaattaaaactttaagaaacgttattttcttgttgtgttgtgtgttgcttgctaccttctctatgtactctgattatttatgttatgcatgtgggattatgggtggagattagactaatgtttccttggggaacccgagctcattgagtaatgctagattactcatgactctacttgttttgcagataaccttagaggggattagagggagtggtgaacactagggaacccgcaatagtttttcagtgtccttttgtaaaacttttaaagtatgtattttcgtatcgtgtacttttgggcctcatgccttggccataaaaacgatgtttatgttgtgatttttccttgtattttcgtaactctatgatattgaaatcggtatttattttaaattatacgggtttcaaactgataagactttgtccgagtcgacacaacatttgggtgaagtgagggtcggcaagcctaagctgatctcaaatggggaaatgagtaaccttgagtgggctaaggatcagaatgtgtttttgaacctcggctactctatgggaatttatttccattgtggcgtctccgagccgtgccggattggccgagttctagtgcggaccatgggcgttacaggcggcccctcaagttttccaccgatcactagggcgcacaaccactccttcctttcctctggccgccgacctcaagcctccctaagaagcccagaaacttggcccatcacttactaatgaacggaaagacgtttctaccctttgatataatgaagccctctaaatattaagattaggggaaaccctaatcaccactcacgaaattaggctgcctcctgcgactctctcgcctccaagccgttctcctcttgttcttcattcattttctcttctctcttctctacttgtaaaagaaagaagatttatcaagctttgaatttccggagacgatctctaaacccttttttatactcatactctttttatgcaatttcttatttatatgatgttgtgttttttgagtatctgtgagtagatctgtagttaggttttaggagcgtttcaaaaggcactcatggggactttagatcaagtttaggttggcggtttctatggttttgtttgatcgtttacactgttctttctagttgtatgtccggaacgtcaactagtacatgttcttaggtattttataatgaggtgaaatcttgtataattgcttgaactacctcaactgaataagaaactataaccgttgctgaccgccaagtgataaggacttctgaactaaaatcaaacttgaacttaatgctttgacctattcttgttaccgtgttggcacctatattctagggttgactgtgtagcttaaagagattagccggcttccacctatagcccagggttagccaaacctgaataagtttcgtatgtacgagaattttgaagtaaacaaacctaaccatgttatcacctaaactgggatctatactttttgtttgaaccataatgcccggagaaaacccccgatgaccttacgctttcgtttacttgtttaacaccactctcttaattgtcatttacttttattgcttttttttacagtcttttttattgctttcttatttctactacacgcaaaatccgaagagttcaaagtcaacaagctatggccgaacaaaggaatcgagacaaaggtctccatgcgtatcagccacaataagtctcagctttacatgagcacggacaacccctacacgatgaagatgacaaccccatatatgaggcagctgaagaacaactcgctccacaagaccgagagcatccggaagctcagccttcctaaatcacttctacacgaagtcaagatccaactctttgaggaacaagctgcaaggattccaacaaggactggtcgaatccttctatgaagcatgggaacgatttaaggactacgaatgtgattatcctcatcatggtttccccgaaggtaagctcataagtatattctataaaggactgcatgccaaattccaactgtcactcgatacggcgagcaagacttcacaactaagaacgtcgacgatgcacgtgccctcattcaaaatttggcaaccagcaacagtaatgcttcaacggattttgataggaccatccgttctaaggactccgactcaaaggagatgtctgagctaaagaacatgatggcccaacttctaaagaatcaaaactgagctgtgaacgcatgcgagacgatcggcaacacggaagccttccaagggtacaatgacacattcgatcaagaagaagaagttaacgatgttgaaacccaaggattctagcagaaccgcggttacaacaataacttcaacaacaactttaaaggtaactctaatctctcttataggaattcgaatgttgagaaccctcatgattaatattatccgccggtgaagcctttccaaggtcgatttccaaacgcaaactacaacaccaacaacttccagccaagagcccccttcaacaacaataatacggcgcccttcaaaactggaccggccgaactcgcaccatccaacgacaataagcttgagatgatgatacaagacagggcaaatgagaatcgcaaggccaataaagctatggaaacacggatagagaataagtacggtgagttaaatggaaagtttgaaagtcttaccacgcatatgaagaagctcgagactcaaatagtgcaaaactctgagtcggtcaaaaggcagcccgacacacttccaggaaggactgaggaaaatcctaaaggatattgcaacattgtagcgggcaaagccgagtccttagtaacacctaccgatccccacaagaacgtggtctgtgatccgaagaacgttgtaaaggggaagcccgaatgctacccattacggaagcttcctaaaggcgaagaccctgggcaagtgtggtagagaagatcggactgcgagatttatctacatccaaccttaatctagtcttcggagattcgtcccaaaagactcccaacggattactccacgaccttctgctagtcgtaggggattgcatagtcccgatagacttttacgtgttagatatagacaaggagatcgacaagccattattcttgcgacgaacttttcttgcaactattggtgccgtgattgatcacaacagcaagaaaaccatattcaccaaggtcaacaaaaatcgtctatccaacaatctcaaaggcgatctcatacccggtaattcctctgcctgataaccttgttggtcctgataccaacaaggtggagaatggcaaccgtgaagctcgccagagggtccaaaagctgaagtccaaaccgcccaaacggcctaacatctcaaagatgaaaatcatcattcctctggagcatggaagggaaggcaaagaacatatccaagagatgataaagcaaactaaataagttttcctacaaggtaaggtttctaaaactccatttagaagaaaacttaacataaaagcgcggcgggatatcaagatatcaaggacgccaaaggagaagcaatccttgaagctcctccctattgaacccaatgggttcccaaacgtcaagccacgacgtcaaacaagtgcgctgaataagagggaacccactaggtatatactcttcttaaggatttaaaatttacttttgcttttgatctttaaagtatttgtttaaaatttacttttgcttttgatctttaaggacttggccacgggcgagagtccaaatttcggaaagttgcccgaatgcatggacaattaaccttaagtgcccaaaacacaatagattatcaaggggcaaagatgggcaagtttaggcatgaacgggcaagtttgggcaccagtgggcaagtttgggcaagaacggccgtgccgcaggcgaagtttgccccgccatgcgttgaccgaccgtttaccgcgcctaggacgcgtggctcggctgacttggggcctaagcaaagttaaggtcccaaagtcgaaaactctgcccgaatcgttgcacgcatttcattggttactgagtgagttctggataatggtttaagtttcataattatattctcatgcatccttgattgatttcgtgagttatatgaatcatgtgaatagttacattggattgcatatgtgatctttagattcttctgctattgtttattgttgagaggttgtgttgaggtattgatgattctatgagtgatttaacaatatgttttataatatcttaaactttggggtcttggtacgtggtgcttgtggtaggaggcaaagaccataagcgtgccaagatcgtgataggtctgaccttcttagtgaactgtgctatcgtggggtcttgtaacgatgtcacttgatcgccatgaagtgcgaaaaactcggagacacggggctagctaccctggccgagtgtctacacgacggtgtagcattttgttgtgatgctccggttgcatacctttggagtgtgtgtgtttggtgttgggtttgaaggcagcatatcgggccctttaaaacttaataaaactagagtcttaatgcatttgcatgttttgtagttgcttcggcaagctacctttcgttgccattctctgttgcgtgtttcatgttgggtatttgggttggggtaaactaatgtctattgtagggaatcgcgagctcactgagtaatcttagattactcatgattctacttgttttgcaggaaacccttagtaggaaatagagggcgtggtggacaataggaaacccggagtagttttgtgccttttgtaaaacaagtatgtttctattatgtaccatgcttttggcactaagccttggccataaaacttataaatgtttggtaacatgttgtgtaatatttatacttatgaaataaatcgggtttcttgtacaaatttacgagtaataactgaacatgacttagtccgagtcggcacaaacattaaatatcgtaagggttggcaagcctaaacgatgttttaagtgggagagtggtcgtcaatacgctggccaagggttgggattggttcccgaaccgcggttggatgttgatgatcattctgaatgtggcgttttcggggcgccagtgactagtctggtcatagagcatctcgggggcgttacaatttgtggtatcagagcatggttaatgatgctagcaggactcgtattttttcaaaatgttttaccgagtaaatgagtcgcaaaaggcatttaggataatccggtctgttcaccattattaggtagatgaattaagtttaccttggttgaatggatgcagatgtctggtcaaagaacagagaggagtgagacgataaatttctcaccagtttatgaaaactggagtcatcatttcggtctgggagactggtaccgtatgttggaggagaaggagatgagggatacaattatccaaatatgtttggagcgcctgatagggatgtccccggaaccacaccagaatactccttaccaaagactgtgcactatagcacatccgaagggtcacactccgggacgagaccacatgttcctgtgaatcaacctaccgtacacccaaatccgtcactaccaagggaagttaataaaggaaatggggaaggccgtaatgttcaaaatgtgccggagattcaacatacgttggggatgattcagaccttgttgactcacatgattcaacaacagcaacaccaacaatagatgcaggaaagccagcgtgccgaatctccttcgactaagttcttaaagctggttatgatgatgaacgatctaggtgttcggaagattaaaggagagtagaatactgtcttagcatataagtggttgaggaacctggaaatgaattttgaaactacaaggtgcgtggaagactttaagggccagatagcggtaaacgttttagatgaggatggtcgagcttggtgggatagcgttgtttcacgatatcgcgaccagcctatcacatgggaaatgtttaagaaggagtttgagtctaagtaatttccaccggaggcacgtgattgtctggagctgcagtttatgagtttggaccaagggcaaaagagtgtcttggcatacgagcaaatttttacaagacttgggagatatttgtacaacggaaaggatgctgaagctatgatggtacgaaggttcctaagaggtttaaggcctaaactttggggacgccttcaggctgttacttataccaatgtgagtgaattgacggaaatggccgtgaatgttgaagtcgggacattttgcggaaagtcggaaatggccagaaatggcaggtaatgaccacttacgatccaagagccggttatatgtgcggaaagtcgggacattttgcacgagattgctcaacggtcgtacagactaaagtgccaaatctggcatttgttacttgttatacttatggggagtcgggacatgtgtcgaatgcatgcccgaataagcaagggggactaaagggtaactgagtcggagcttgtttcatttgtggagacctagggcattatggtaacgcatgcccgaacaggcaaataaggcagtataaccaaatgcttaatcacccaccgccagttcagaaagctaagggaccaccggtaaagaagcaagccactccagcaaatgtttatgccttagatgtagaacctaccaaaccttcaagacccgcaaaaggtcccataacaggttagtatgggttcttactttatttgtttatgtatgtttgagtgattgattgttgtgtgcgtagtttactagtttaaatattgcatatatcattttcatatgcattagggacattacttgttggtggtaaccccacacatgtattattcgattcgggagcgataaatagttttgttagttctgacgtggccgataagtttggccatgggtatgagaaaagagaagtgaaagttttggtacataccgcgggaaaccagccacccctgcagacccgaattgtgttattaggagtcccaaaagttatccaggatacgatcctaccggcaaaccttttggtaatgccaatggaaaggttcgaagttatccttggaatggattggttatcaagataccatgcccatttggattgcgggcggagcagagtagtgttcgaacggaggaatcgaccacaactcacttaccgtggaatcaatccaagtaagattgctttgttcgtgtcagcactgaaggtcgagaacttgctaagaggaggagaactctaccttgtcactttaaccgcctttggtggagaagttgaaaatgactcaaagattgaagagatcccggcggtgaacgaatttgaagaagtgttcaagcccttggaaggattacctccaccgaggaatcatccgtttcccattaatcttgaacctcgggcgattacaattgtaagggcaccatataggatggcgccagccgagcttgtagaacttaagaaacaattggaggatctacttgaaaagggatttattcgtccagggggagctccagtattgtttgttaagaagaaagatggaagtatgcggttatgtattgactaccgaggtcttaacaacatgaccattaaggataagtacccatttccaagagttgatgagctattggatcagttgaggagagcatgttggttctcaaaaattgatctgtcctctgggtaccatcaaatttcaatctcagagctgtatgtaatgaagactgcctttcaaacaaggtatgggcaatatgaatttgtagtcatgccatttggacttacaaatgcgcccgcagccttcatgagacttatgaacgaggtattccatgattatttggatagcttcgttatcatatttatcgatgatatcttggtatattcacggagtgcagaagagcatcgtgaacatctgtggaaagtgttggacagacttagagaacaacgtttgttcgctaagtttagcaattgtaagttctggcaacgagaaattggatttcttggccccaaaatttcaggacaaggagttacggcggatcctgaaaagattgccgtaatacagcaatggtcgcaacctacatccattacaggagtacgaagcttcttaggattggcaggctattaccgtaagttcgtcaagggattttcatcaattactaagcctttgacccgacttactggtaaaggtgtacctttcatatggaataaggatgttgaggaagcctttgttaagttgaagaacgcattaacaaccgttccaattgtagctttgccggagccaaataaaccatatgatatctacacggatgcctcgagagttggcttgggatgtgtccttatgcaagaaggaaaggtgattgcctatgcatcacggtaattaagacgtcatgaggagaattatcccactcacgatttagaaatggccgctgtaatattcacgttgaaggcatggagatcatacttgtacggggagacggtacgagtatttacggatcaccaaagttttaaatacttatttacgcagccagatctgaaactacgacaacgaagatggatggagttaatcgccgactatgatttgaagattcaatatcacccgggaaaagctaatgtggtggcagacgccttaagtcgccggaaaatggaagtggatgttggaaatgatctagagtcgttaactgataagttaaagaaagtgactttgttagctctagagggtgaatctagtgagcccttgggtttacaaactgtgactcaaacaaacctacttaactgaatccaagaagaaccggcacaagatgaaaagttgtagaatatcgtggaggaattaaaaacattagatggaccaaatgctagtggctaccatctggctgatgatggcaccttattacttaatgggagaattactgtgcctgaccgtaaggattacgacaaaaaattttgaaagtggcacatacttctttgttgagcattcatccgagaagtacaaaaatgtacaaggatataaggaagtattaccattggcctaggatgaagagatcagtggcaaaatgggtaagccaatgtgattcatgccaaagagttaaggtggaacatcaagtaccagcaggtttattgcgtaacctaccaattcctgcatagaactgggagtcaatctcgatggatttcatcactggattaccaacaagaccatgacgtagcaatgatgctatatgggtagtagtagatcgcttgaccaagatggctcatttggtatcaatgaaaagcacggatcagtcacctatcttggtagaaaagtatatcgatgaaatcttaagactccatggggtcacttgctaatatagtgtccgatcgaggtcctaagttctcatctatattttggcaagacctccagcgtgctttaggaactgacgttcacatgagcacgacatttcatccagaaactgacgggcaaactgaaaagaccatccgaaccaaagaagatatgattcggctatgtgcactagaatgggctggtgattgggaagactacatgtctttggttgagttttcttacaataacagctatcactcaagcatcggtatgtcgccatttcaagcaatgtatggaaggccatgtcgaactcctctttgttggacggaagtaggagagagtacgagttttagtaattggttaatcgatgagactacggagaaaattcagtttatccgagataatatgaagaaagctcaagatcgacagaaaaagtatgctgaccgaaagaggcgtaacatggaattccaagaaggcaacatggtttatctcaaggtaaccgcgttgaaagggaaagatcgctttgtaaaagttggaaagctcgcggtaagatttattggtccatgcaaaattgagaagagaattggggaagtagcctatcgtttgtatatgccagaagaaatgcaaactaaggaagcacgttccggatcctaatgctatcatacccgagccgatacaagagttgagaacgaatctcacctatcctgaaagacctcttggtattgctgaaaaacgaatgcaggagataaacaatagaagaattccgccaattcaagtttcctggggaaggcaaaatcgtaaggttattacttgggaagatgaggaaaagttcaggacaaaatatccacagtttttcgaaccaggaaacgtagaggatgtagccggactgtctaatccttctggaattcgggacgaattctattaagggggggagaatgtagtgacccgcgtaaggacatcggccacgggcgagagtctgaattttggaaagttgcccgaatgcttggacaattaaccttaagtgcccaaaacacaatagactatcaagggacaaagataggcaagtttgtgcaataatgggcaagtttgggcatgaatgggcaagtttgggcaagaacggtcgtgccgcgggcgaaattctcccgtcgggcgttgaccgaccgttgaccgcgccaaggacgcgtggctcgactgacttggggcccaagcaaagtttcttggagccgaattttagttgcgtggagccgaagtttgggtggccacgtgtcgctcatccgctagagcaacgagcgtgtcatcacgggtctcgaagctgaaaactctgcccgaatcattgcacgcattttgttggttactgagtgagttctggataatggtttaagtttcataatcatattctcatgcatccttgattgatttcgtgagttatatgaatcttgtgaatggttatattggattgcatatgtgatctttagattcttatgctattgtttatggttgagaggttgtgttgaggtattgatgattctatgagtttgatttaaccatatgtttcataatatcttaaactttggggtcttggtacgtggtgcttgtggtaggaggcaaagaccataaacgtgccaagatcgtgatatggctgaccttcttagtgaaccgtgctatcgtgggggtcttgtaacgatgttacttgatgccatgaagtgcgaagaactcggagagacgaggctagctaccgtggctgagtgtctacacgacggtgtagcatttggtagtgatgctccggttgcatacctttgtggttgtagcacgggagatcacgggagtgtgtgtgtttggtgttgagtttgaaggcagcatatcgggccctttaaaacttaataaaacaggagtcttaatgcatttgcatgttttgtagttgcttcagcaagctacattttgttgccattctctgttgcgtgtttcatgttgggtatttgggttggggtaaactaatgtgtgttgcaggtagtcatgttaatatgggctaacccaccccaattaaacccaccccatttaaacccaccccatttaacttcaaacccatataaacccatttatatttgaaccccatttaaccttacccatttaaatttagtaaacccatatggacccatttaaacctattaagtgagatattgtcttttattaattcattcataaacttgatagataaataacaatagcccataaacattagctaaatctgaaatatttataatccattaaaacatagatttcaataacattgaacaaaacaaaaaaataagagcaaatgatgagtgatccataaatcttcaagagcattttcatagcgtagtgtcgtcattatcttcaactgtacctacaattcaacataaaaattagtgataacaatcacttaattataaagtagtttctgtaaatcttaaattattaccttcatattctgcgaaaccacgtaaccagttacgtgtacatagcaaagcccgaacgttttgtggaagtaaacgattcctatatggtgtcaagactctacttccaatgctaaatgctgattccgaagatactgtggtaattggaatactgagaatatcaagtgccattaaagctaaatccccaaggcgatgttggttgtctttccaatacctcaaaacatctaaatttggaaaagctttccactctagtcttggctcagccaaatagatatccaagtgactctttgtgttgttcacaccagcttcaatgcttctttccaactcaaagagatcctgtattacaaagatttacatcagttaacaatatggatttctaatatggaattttaactttgtatatgaagatacttacattatcgaaatcatcctcaagtggagattcactaagtaagtcatgtggatttgttgtccctgaaacacctggagaactcgtctgataagctttaaaaatcatttccaaattcttctcaagttctttaatcttcaacgcagaagtagtgggatctactttctgataagctacttcgagcatctttactttaagtcttggatctaaaactgctccaatagctaaaataagactgtaatccttccaatacttagcaaacttgattttcatttccatagccatttgctttatatcctcatcatcacaagtgacgtacttcttcaatagtaattcaatcctccatacttgggtgaagtatacattcgatgtcggatatttggaacctgaaatataagtagtgattacactaaatggcttcaacaagtcacaaatcttttcaccatgatcccactcatcatctgatggtaaagacttataattggtgtcaaaagccttcatgctatcaaatgcttttctaaacttcaatgctctagcgagcatttcatatgtagagttccatctggttggaacatcaagagataaccctgccccactccttattcccactctctctacacaggctgcaaatgcctctttcctctgtggagatgctttaacatataaaacactttctcgaatgttgtgtaaaacatccttagctaactctaaacctttcttgacaatgatgttaagaatatgagcacaatatctaatgtgcagaaatttcccatcacataacaaaccactgccactaatcatctgaagctgacccttgaggattttcaccatactattattattggtagcattgtctagagtcatagaaagtaccttttttctagtccccattcctttaaacaatcaagaatcctattagcaatatgttcaccagtgtgcggagacttcaactcacaaaaatctagaatataactgtgtaaatgccaaccttcatcgataaaatgcccagttacacaaatataactcgtcatactagccttagctgaccacaagtccgaagtaaaagaaactctaccacgatgctttgcaaaaagctcttttaacttttctttttctacttcatatctcacaaaaacatcagcagcagcagtttgcctacaaataggctgataatccggatttaaatatttgtctctcgctcggactttctcatattctacgtatcgaaacggtaaatcatgatagataatgacttcactaaccatctcacgatctatcttctgatcatataccggcctatctatcttcttaggcatcttaggacacttctctaaatggcgacttaagtgatttgttccataatttccatgtggtctactactagtacctatcaccaactttgtaccacaatgtatgcacttagctctttctttttcatcactctctaaccctactgaaatgaaatcatcccaaacatttgaagttttgcgtctcttacgtggagtttgttgagtttgagtcggctgaatttgtgtttcactttgctccggtgcttgcacttctgcatcttcctcattcatgtctattaagtcattttgtgcattgagaaatgcaattgtttgtagagactctaaatccattctgaaaaaaagagaaacaaaagcactaacgttagtttacaaaactaagactcaagactcaaaaaacacgaacctgtttctatcaagaaaccactttactttagttttcaattcatataaaacacttaaacacaacaaacctgtttctatcaagaaaccaaataaacaaaaccaataaagaacattttgagtttgaaatataagaaatactaataaaatcatgctaaatacgaccaatcatttgagaagtactaataagaaagcctcacgtagcccaaaagtccaaaacaaaacttcactaattaagaaaaaaggtaaaacgatggaagaagaattggtggtactcaactactcattaataaaacaaaacgtcacttcccagtttggaacaaaattgggtctggaacaaaattgatggaagaagaaagatgggtcttgttcctttacctgagtgaattggagagagagtttttttctcagcaagatctcagcaaattgattcgattagcgacgcaacaaattgtttactgtgtctctgcaaattgttctttaggttagaaataaatgggctatccatttatttaagagaaaacccatttaataagtgggcttaactgggttaacccatttaaccaattaaaacaattttttataaatgggtctaaatgggctatttatttaacaacatacccatttaattaaatgggcagtgaaacccattttaacatcactagttgcagggaatcccgagctcactgagtaatcttagattactcatgattctacttgttttgcaggaaacccttagtaagaaatagagggcgtggtggacaataggaaacccggaatagttttgtgccttttgtaaaacaagtatgtttctattatgtaccatgcttttggcactaagccttggccataaaacttataaatgtttggtaacatgttgtgtaatatttatacttgtgaaataaatcgggtttcttgtacaaatttacgagtaaggactaataatgacttagtccgagtcggcacaacacttaaatattataagggctggcaagcctaaatgatgttttaatttggagagtggtcgtcaatacgccggccacgggttgggattagttcccgaacctcggttggatgttgatgatcattctcaatatggcattttcggggctcccgtgacttttccgatcataagcgtctcgggggcgttacattcacctagacccgtcactagtcatgatgacacctagcccggacactcgtctgagtgactagcgccgcctgaagaagcctgtctggttgtgccaatctttggcgggacctggcccacctggcagcctggagcaagcccgccgacccggacaacctactgcgtgccggcccagtcgatccaaaatttggccggccaaaactcggccacccttggcaagcccgtgaatggataggaaagttgcattcaatggattcggccgaccaaaaactccgccacccactaaggcgatcgacctgccaatggattcgttggactcgcaaactatcccgctcagctagatggttgcttattacccgcccacaccacccgtttggccaattatcgcaactgccccgccatccattcacaccatctgtcaccacaaatttgatcttatttgtggctagggcggcataatatctgaatccaagcaccctatccgaaaaacccgattcaaattcaaatccaaaatctcaaaatacccaaataggttctacacttccaaacctgaaaaaccgaacccgaactcgatccgacccgatatccgaacgggtatccgaacatatccacaatttaattacacagttataatatattatttgggaaaaatcccaaaaaaaaaccaaactaattttaatttgaaactttaatatccatatgttttgaattggtaataaaatacccaatataataaattgttgttagcaaataacctgatctatttttgaatggtaataatgaacatggtgtttgatagacgttaatttctctgatggaaccgttaaaccggttccgatggttaacaaagcgtggttaattagactaattaaaagattacactaccctcattcctttcttcctttaaatctagaattgttgaacccattgaaccctaatttcatttccttctttgaaaccttaaaaattcaatgatggtgagccataactctgggtcagatgcaaatttggtgagcaggaactggggtcctctttgcaactgtggtagggctacgacggttgtgaaagcttgaactaacgaaaatcctggaagaagatttttcaagtgtagtgttcatggcttcttcaattgggcagatgttgagaagccatatggtttgcagaaggtgagcttattcaaagcaagggatgagaatcggcagcagaaggaggaactttagacacttaaagaatctctaagcgccaagagtagccaagatttaagtgcttcaacaacaatgaaccgtgtgttattgcctaacgagcaagagaaggagaagctcgaaaacgatgttgtggttgctaatgagaaggaaaaactgcttcgttagtttattgtgttgtcatggggaggcttcattgttgtaattgggatgatacttgcgatggggaagtagtgtttggttgttgttagtgttgtcttgcaatgttttgtttcttgtattgtggtatgttagttatgtaactcttgtttgtatggaatggaagcttaaaattgcttagtaatcaaatgtaactcttgtttgaagtaatggtattgaagcttaaaattgcttaaaagtcattccatttagccaaaagaacctttaagtttaggatctcaccaaaacatacaaagatccaaccatcctatatagataattaaacaacatcctacataaaataagcattcttaaaagacataatcttaaatcctagttcttgtcaggctgcaaaaacatcaaacactttgttagtccatggagacatcatgaaaacagtctgcttgggtgcttcctctttgcctttgccacgacccttgccacgagctttagaaggatctttgccttcaccatttttggttcctagaggacgccttcgagcacgtcatgttcccttttgattagctgttggagcacttgaatgttgcaaaatttgagtggactgactttgagaacaagttggtgtggactgactttgagcttgctgccacctccttggtgcattgtgtatgctccatggatcatcattatcctatgacaagtcaacaacgcaaatcaaacatagctaagagtagacaaattatagggaaaattctagagtaattaccttactcttccttggtctccctcttttgcgtggaggagctgacttatactgtggcatttttgcaggttcctttattatgtcctgattacttgcagttagtacaagtcacagtacctccttctcttgattcctttgtcagataagtcgttgattcacctggttcaagtatcctagcaaagttcttaggacgccctcttcttccttttatcaggcacttgaattgttccttttcctgtcttcttccacaacatttttccattcaatggttctatgtttttcttgtagttggattgccagacagttgtcagaaagcggctatcaacatagctgcatagaagaacaaagtatatcagcaagcatatttacaactcaatgagaggcgagttgattaaaacttatgcttggatctcggttatgttcattgatgacaaagattgcatgtggacaaggtattcatgtgagattccatttgttgcaagcacaagtcatgtggaggatgttaactctaaagctt

SEQ ID NO: 1479 - DNA, 35313 bp, Arabidopsis thaliana
gatcaccgatgacataaataaactaataaaacatcgcggatttaaaacaacgaatctcgattttctctctcatcatttcattcactcttaaggcgggattgtgaagtcttcatcaatttaaaacatcaaatgagtatatgaactagaaaaagttataaaaataatataatatagtctaaaatcttttattttagactttttttccgagatatcctatgtatttttttttttcttcattaaagtttctaattttctatcctcttggtttttgttctgttttcattttcttcccgttgtctccatgaatttttttttactttttcctcataaattaattttaagctgtgttctaaaaagcggtttaggcggcactacgctcttaagtgactcgtagacaaccgctttgaccgcctaaatttgcataagttccggtttactgtattgttttttatttttaactatataaaactttcttataagtcttaactcaatatatattctttgatatgaatttaactaatttttgtttatgatttaacattttaatttttctaatagatagttatatataatttattatctataatattatattcaatatgtattatattataaacttttaaactgtataaaatcgtctaaactcctattaagcattgtaggcgttaggcgctatgttaccgcctgcctagcgttttcttcgacactgattttaagtaacatttcgagctagtctcattaacgcctctatttatatttgataattttactaattcatttttttatcttgatttgaaagaaaaatgttcagtggtaatatgattagtaaaattataaaaaaatttctttcttttattaaatacaaaagttcttaaaacgtgcagacttgaagatctccacaaacctccaaaagtctattcaaatggcagagacagttgaatccatcatcatcatcatcatcgtcttctccaaatgatctttcaatctcattctcatcatcttcttctctatcaatcctcatcttcctcctccttcttcttcctcccaaagctcatcaccaaacctcctctctccctctcatttacctctctttcctcaatgctcccttctctctctctctccaccgccaaccgccacctctccgtcaccgacaccatccctcttcccaactccaactccaacgccacccctcctctccgtatcgccatcatcggattcggaaactacggccaattccttgccgaaaccctaatttctcaaggccacattctcttcgctcactcccgatccgatcactcctccgccgctcgccgtctcggtgtctcatacttcaccgatcttcacgatctctgcgaacgtcatcctgacgtagtccttctctgtacttcaatcctctccatagagaatattctcaaaacgttgccgtttcagagactccgtcgcaacactctcttcgttgatgttctctccgttaaagagtttgctaaaactcttctccttcaatacttacctgaagatttcgatattctttgtacacatccaatgtttggtcctcagagtgtgagttcaaatcatggctggagaggattaagatttgtgtatgataaagttaggattggggaagagagattgagagtctcaaggtgtgagagttttcttgagatttttgttagagaaggatgtgagatggtggagatgagtgttactgatcatgataagtttgctgctgaatcacagtttataactcatactcttggtaggcttttggggatgttgaagttgatatcgacgccgattaatacgaaagggtacgaggcgttgcttgatttagctgagaatatttgtggggatagttttgatttgtattatgggttgtttgtgtataataacaactctttggaggtgttagagaggattgatttggctttcgaggctttgcgtaaggagctttttagtcggcttcacggtgttgtgaggaagcagtcttttgaaggtgaagcaaagaaagttcatgtttttccaaattgtggtgaaaatgatgcttctttggatatgatgaggtatgtagttagttagttagttacattgtgtggtttgatgcattttggatttggtttcttattgtaaatagttatcgatttgtgatcttgcaggtcagaagatgttgttgtgaagtatgaatataactcccaggtgtctggtagtgttaatgacggttcgaggctcaagattggtatcgtcgggtttggaaattttggacagtttctaggtaaaaccatggtcaagcagggtcacactgtgttagcttattccagaagtgactacactgatgaagcagcaaagctcggtgtttcgtatttttcagatcttgatgatctatttgaagagcatcctgaagttattattctctgtacgtcaatcctttcgactgaaaaagttctcgagtcactaccgtttcagagactgaagagaagcacactttttgtggatgtactctcagtaaaagagttcccgaggaatttatttcttcaaactctcccacaagattttgatattttgtgcacgcatcctatgtttgggccagagagtggtaaaaatggatggaacaatcttgcctttgtgtttgataaggttaggattggaatggatgatagaagaaaatcgaggtgtaacagttttcttgatatttttgcccgtgaaggatgtcgtatggtggagatgtcgtgtgctgaacatgattggcatgctgctggatcacagtttatcacacacacagtgggaaggcttctggagaagctgagcttggaatctactcctatagataccaaaggttatgagacattgctaaaactggtggagaatactgctggtgacagctttgatctgtactatggactatttttatacaatcctaatgcaatggaacagcttgagaggtttcatgtggcttttgaatcattgaagacacagctctttggacgactacattctcaacattctcatgagctagctaaatcatcttccccaaagacaactaagctattaactagctaaagttaatattctctcagtcatgctccttgactactaattatactgttctactcaatactcaatatggtggaaatcgtttggtctttgaaaggctttgatgtaagtttctttctttctttgtagctttatttgacccttttgtgggtttgttgtgtcttttgtcctcgatacgggcttcacagtcccaaccagtttgaatgttaaacagaaataaagtgcagacaagattttgagtttggaaattgtttcacttattttatttggttcaaatactttgaactcacagctttcaatgcttataggtttatgaaagaaaggtacgcttctttatttttctctaatcaaataactgaatgaaggaactgtcttaagttccatatgcagctaccttaagcacatgcaggtacaacaacattccgcatatgcacaaacacaatggaatatggagctattgttattggctctgttgaatttatatgtatcggctctataggaggtaaatcacccatcgaattaacctgaagagcatttccgttgagtagcatagtctgactgtgtaggtttccatcctttgctgtcaaatggtactcttctctttggattactccattaggacccccaaaaagttgggaacttgctcttttataagacttcatgtgctttgtatgtctcagactgaaactgttatttaactctactttcgctacaaccgttgtagtattgtcaaggttcatcagtaaaactgtgatccctttctgcatgatgaaactttaaaagttagatcggaattcatctgagtataatgctatttgagttacttgtatggaaactcgacttaccgattgtcttgcacaatgggtgtacgaacgtatctttttggttccggaaaaggttgtgaacaatgcctttcttcccataagttgtcgccagatcagagcactgcatgttaacaagtagcatgacttgtagttagggttatatactccttttattgcttgtctttttaaccatttctcctggtgacataatagattcatctgatgttacctgtaatagtctggatttggtgtgaagttagtagtatttagcagcccatagtttcctccgatcagagactgtctacagtatgtttttgtatcataaagcgatgccataccaagctggtccaggtacctaccatcacacagtttaatctcattagaaatgcttttaatgtattacttatgataaccttagtttttgctgtcatgatatctactcttaccagaaactatacacgaaagcattagagacaagattccgcccactgttgtaggcaccaccggactcaccaacccatgccacagcctttgttgaggagtttttgattatgttcttgagactgcgaaaactttttgcctcttggtccagatatgaagggtttagaatcttttctatcagatgttcatcgactcctaatcaatcaaaatattgttttctttccattcaggtaagggaaatgatgaacctgcaggatctgaaacgaaagatagttgagtattcgggttacctggaccgagatcgtagatatgtcgagtagtagcattgagagagttttctgctttgttcaggtattctgtgaaccaatcaacttcaaagaagccacccggacctatcaccaacggcatgggactcacattcttgtaaacccggttcacaatgtttcgcagatttatggtgtctatagcatattgatttgcaccaactcgtgcaccaacaccacttccacacagctcattgcctattgagaaaagaagcaaaaccagcttggagatgagtagagaattcaatcaggcttatgcattctttgttatgttgtaaagtgacttaccgagctcccacccgtcgatggtgtaattgttctctgctgtaaaccggatgaacgattcagcattggtgtaattccaggctcctatggcttcaccgttagattttatggaacgtccagaaagtgcattcagcccgaagatgactttagttctgattcaaacgacaagtaggtaaggacagagacagagagaagaaaagaaagaagataatttgaagatatctttagctctgattcaaaccacaagtaagtaagaaaagagacagagagaagaaaagtaagaagagaatttgaagatgactttagctccgactcaaaccacaagtagataaggaaagagacagatagaagagaatttgaaggtacccggttttgcgaaagaaggcattgagctcgtcccatcgacgcataggtagacatccttgtgtgtaaccaaaaagaattgaagagtttttggtaaaaggaagacatggttgcttcgaatctggtgtctcatatatcactatgtcttgtaatgttcctcctattcttattttcaacggagcaaatgctgtgtttttggaaattggaacaacaatggtcaaatcctaacattaaccaatataaatcaagaatcatgtgattacctttgattgcattttgaagaataacgttgttcaaatcctgcaagatgatcgaccaaatttttcattagatttcatatttctctaatcaactcttcgaataaattacttcatattaacatgaccaaattttgtttgtaatctattgttaaaatggcatatgatgacaaaacaaaggaatacttttacttgccgaatcttgatttttgactttcacattccataaatggtaaaaatgattttttttttttatctctacattttctacaattagtaaattctatttgcttaatgaagagtagtagtacctaagaaatctttcaatggattcctgctacctaaccaacccgaaataaatacacaaccttttttattttggttctatcaaaaatgcaagttgcattgttttcgacggaaaaacatgaaaatgaaacaaaatttgatcaaaaaaaaaaaaaaaaaaaaagaaaaaacaaaccagattgagaattgaagcatggtcccaactacaactgccgtagtcacatttctccggtggccaccagtctaaggtggcgcaaatgaagtcttcatctattgttccaacggcggctcttccgtacacaaacacagtcccattctcttctacggcggagctaacagtgcagtccaagaattgaaacacacaaagaaacaaaactatggccaaaatttgacgataagccattgtttctctcttctttcttcttatttattagaaaaatgagatctcatttggtgtttatataatatatggaaatggaagagagacacacattccaaaaaaagtgaaattgttttctttttttttcacttgtttgagttgttacttgacctttaataaaaagtgttgtacatctctttacctgcacaacttctatatattattgtttttgtttttttctttgaaagaaacttttatataatatacatttatatggttattaatttattttttggtcaacttttcttaattctcattatatatctccttataaggattttttttgaaaattcaaattttggtaatataaaataaaaaaatgtctttaaaaaataatatactataatttctatatatattaaaatatttaaatatgtagcaaatttcagtaatgatcactaaattagaataaagctatctatcaagaacgtgatctaggtaaaaagtctctcgtggatacttataattgttaggagaattgtcagttgttgagacttgagtatttcatgaaagtatttgctatccaagtgtttatattgtcatgaataattttattatgcatgtaataaactaataatataagaaataacaagacagaaaaaatcacttataaatgattaggaaaaaacccaaaaaacacggtctaatttaaatttccccgtttaatatctgaattatgaaatttgtccgaaaatatctaagttaatttttatgtcttttaaaaacttttgttttttaaattttggcaaaattagatatctgaattaacgaccgtaacggaatcactagctgtagttaaaacttaaccatatggtgtttactatatatataatttcttttttaattgttacgaatatattgtcgtagtcaggtggttatgtgagagttcaataaattggtattaaatggacaaatttaaattagacgatggttttttttgggggtttttcccctaaattataaaaaaagtataacaaattatataatatagatgaagctattttatttttaatttcgtaagttatatacactaacgaacttaggtagcaatttgtgggggtgggccggggcaggtgcacaaccatgagcagaattaggtagtcaatgctccggttagttattcctctatagatatatatcttagcttcgaaacttaaaaacaaagttattggaatacttattcaactcgatatcatatagttagtaaacatcagtagcaacgcatatggacaaatgtcacctattttttatataacagaaagataaaaacacaactgactataacaataatataacatatatttcaaaattcttggtttttttagataatgattatcttgatttgcaattagaatctccaattgtttaacatgagcatattaggtgaacgaaaacaaagttgttgatactgacactagactggttagatttcatgtacgtggtgttctagttttttagaatacctatacattgaacaaattgtattgaaacataattaagaactcagaataatagaatatcaaaactagtgaagatacatggcttttgtattgaaacgtaattaagaactcagaagactattcaacgacatcctttcaattattagtaactaacaaacaaaaaactatgtttatcttgtgacatggtgttgacgtgaacggtatagctttgtagaaaatatgcaggtcattaatgttggtgaaataaatccttctgtttagctaatggatcagatcgatcgataccatatcaccaacagactagtatatcgtcattcactaccatatatcatcaaccatcaccgaataatggaggacactaatcaacctcataattttaaatgcaatgtgcacttatgctgacaaaaaggtccatgatcttatgcatcaattccttaaggctttggaaaggtttgaagtaaaaaaaaactatgagaatcttaacaaatttgaaagcaagttcaggttaaactttgaagcttttgaatggatttggctttgaaaacccttcttaacacccaggcccgtctctgacccatggcagagtagggcaaatgccatgggtccattacaaaattcaaaaaaattcttaaagaaaaaaggtccatttttatttcaaaaaaaaattactaagaggtcttagatttattttggattttaccaaaggcttataaatatattgagacgggcctcttaacacctaagacttaggaaaagtttgaagtaaaaaaacctatgaggatcttaacaaatctgaaagcaagttcaggagaaagtttgaagcttttgaacggatcgacttccaacaacgaaaccaaaaggaagatattcaagagaaaaatatcaaaatcatcaatgtgatgtatctctcgaagctatagaaagaattttcaaatgagatatcaagatgttacggttctgcagtatgcgatgaatatgctctctccgtacgacaggagaccacgatgaacggttctgtatacaatattttggaacctcaggtaagcttcaccggtaaactgcaagaaattacattatctaggataaaatttcgtacattatgtaaaagcctttaaacccttaattgttttgaaatatataatatgtattttacatattttggatttatttcatttgtatctgttaaattcaaaaggaaaatatttatttcagttttcttaagaatacgtttctgtttttataaataaaagatttccatttatttatttttctttattgactagttacattttttttactataaatgctcttttttatggaaaataatgaatctttctttttccaattttatatttaaagaaatatatttaaaatatataccataggtaatattaaatttttcattggacattacattcaaaaactctaaatttactgtattcaaagttaattttctttatttatatacttcttttgttgctctatatcgcatatttaaataaattaaagcctcatcatgtatttctcttatgaaaataacttccaattttatataattaagattctgtaaataactattttgatactttttatttttgaaatatgaagcaaaaaaaaaaaaaagatgataataaataaaaaatctttaggattgcttagaaatgataacttcggagctatgcttaaggactgattcttctgctttcctttttgcattcttctttatttgaatcagtttcatcctatagaaaaaagcaagaacttaattatcttagtttcatcctaattttagccttatactactaatagtctcaataaaattgactcacctcttgaaagagataattttctctatctcttgcttttgttcagccttaaaggctaaccattttcataagtacttaaatcatccaatgttcctaaatctgtgcattcataaagaccaagcttaaaatacttaacatattctcattaaaaacgtaaacaataagttagtaaatttcacaccttaaagcaaaaactttgctttttctctaaaccacatcagtttctagagaacaagaccattgtcatccaatatgattgggtcagttctaacagtttcacatgttttcatctctacaaacatatttctttaagttaatccttcatagcaacatgaaacagaaaaggataacataacaactgtaagaccattgatataaaaatttcaagggatttaaacttacttctagatgcaatcctttttgcctccagcatctcgtcatgagcttctttatctttagtttttaattgagataaaatttctttgtgctcttcaatagataatagagctccggtattttttcatatggattttggcaatatgactttgcatcgtctttctcagttgttttttcctacaaaaataaggtttaacacatagaattgatattaaaaaaaacttgcagatttttttaaaataccatttttttgcatttgcagacttttttgcttctattttcattgtcttacactctgcatgtttgttcttactgaataattacaggtctttgtctttcagtgcaagtagcaacaattggttcaataatattggagatttgctgttgaagtcaggagttttgagtgattcccacttgaaatctttgaaggaggtgttgcaaagtataaagagatagatgcatgaagaagactcaaacttctaaacttcttatgtgtgaatcacttagcacattgtatgtaaataactattttgtttaaatttataatttgctacgacttaaaacctatgtttgaaagatttcagggccatgaggatcttaacaacccttggaacaggacaagccatctctaacttcgctttcatttgaccatgagaagtgtcgttgtggttctcaactcttctttgcaatcaggaatgacatgttgcttttacgatgcaagcagaataaatgccgagatgtcctgtggtccgagaaagactatctattttgcggaatgtgtgtgtcctaagtgtaacagaccaacaaacctgctgttagtcttcagaaagaaatcctggcaaactctactataagtgtcacccatgcagtttctttaaatggtggcacagatccttgcaaatgatgggttatataacaaggattcaaaagcatgtttttgtgaatcagctcttcttgattccaaatgacaaaactcttgttgcttttgcccaatgagatgattgaatccgttgaggatcatccaccaacgcatagagacacggtcgtagaatttaaacatcttataaaaatatttttctaagttctttgggaaaccaggactttatattaaacatcttataaaatattacaaaagcttataaacttttttataaatggcttataaaagctcttatgagcttttaaacatcttataaaaatattattaaagcttagaaacatcttataaaaacattatcaaagattaaaattataaaaagcatatataaagtcaataaaaacttataaaagcttataaacatctcataaaatgtattatactagatacggacctgcggtacaccgcaggttgagcatttgcgtttgatcgtaatatgatggtttcattataatataattgacagttaaatcattatagttaatttgcattttttactatatatttatatctattgacatgggtgattatatttgtatgtttcggtctggttttgtaaagttccacaaacatgtataatattctatttatatacatcggatattattacatgtaaattcatatgattcaattggtttaaaatttaatttttggattgtaactgtaattatcattaaaattacatgggtgctctattgttatatgaagtatatgatgtatttaaatttctacaataatttaatttttatactaaatatttattatataatacttagatttttttttcttgtatacagatgaagagataaagagtggaactcatcatctccatctaaggttagatactaagaactcttataatgcataggtatattttttgaaaatatgaacttagttattgttatataaaatagccggatatttaaaattttcaactaatcattttgaaactgttaaacacttgattcttatatgcttaaagaaaatactaacttgcagattaaaataggaaaaagattaaactgaaaccatctcttccaaaatgaacacaatttatgatcattcttacaaacaatagttcaaaagataaaaccaatatcaacttaagaatgaacaatttgattgttaaaagcagtgtaaattgcttatacaaatccttcttcagacgaatctgactctaggattagtccttagcaacatactcaatcctcccttcaacagacccatctggttcacctgcaaaaaaattgttgtaacaaaaatagaaaaagatgtcaaacttcttgaaaaagttagtatctaataaacaaaaacaaattatctaatgtcttttacatacatgtaacatgttacatcaaagtctggaaacgattcctcaatgaagacccttaaacacccatactcgctgattaaggccttagatcctataatatttgttatcattctgttgattagttatatatcacaggatttaacattttaaggtaagagactaacatattaacgaatttccactaacctttaaacatagaggttctacagaaccggagcactgtagtgattggctcgtagttgtaacttttcataccaataagtcaataaaactttgacagaaaagactcacacgcactccctctagcaacacaagttatgatcctctcactacaaccaaagaaaatacaaatttatcatactacacatatatgtctgttcctaacgaatttcaataccattatacatccatgattgttaactcactgattatctctgatggtaaatattacatatctggcctcatagtctgtttccacttcacgacagcaatatggaaaactcgacatagttgagacagttgttataactccaatagcatctaacaataacagaacaataaatcagaattaatcaaaatcttagtactaaggaataacaattccaagaaaccatatactatataattaagacttatattaccgactacatgatcctcagattcagcattgacttcatcagcatggatgaatttgagagaactttcttctgctctatcacttacaggccacattttagtgtgccacataaactcgatttcataatgaaaatctgtgtactttggtattgttgttgctctcttcaatcgaaagtgttgaaggtaataccactttccttcaaataggttagtcttaaaattgttcatatactcgccccaaggtattctagcatcgattttgtttccctgactaaaaagagaaccatataaaattctttggaaaataatagaaagcaaaaaccagaataacaattcaaatatacatcatagatactcaccttcacatcacagaggatcatggtagtaggagttggtttgatcatagactgattgtcccagatgcttaatattttcacgtatataacatgattgttcctgtgtaaatttagatctgggatataatttctctcggccattggaagtttggatcttaattttaacagattttttagaaaagatagattgagggaagttaacctaatattggtcttatatatatatatatattgaagaagcacgaggaaatatgaatatagattcagtgaatataaatgaaaggtttcttgctatatatccgttcaaatcatttagtcaatctctaattatatgctaaccgattctgtagccaatcaccatatattaaagtctttttgctaatgattgctgatatgttaagtagataatgacaataaagtatttggattcaacaagaatataaataatggttgattagtaccaaaacacaggttagtaccaaaacttctaaatggagaactgaacatataagtctgctttggtgtgaacatcaaagttgaacatatgagaacatgattaaaagtgtagagaaataaaaacaatttgaaatagaggttcacttgtagtaattttaaatcagtatctaaccggaacatgttgaattgttgcttctttgtttgcttcagcagaataatgtaaataatcctgtgacattacagatcaaatactacttgtttgttactgtgtgggggggtttaacaaccataaatgaaagtatataaagtgaataaaggttgatgaagaatacctttctcaaatgcttggaacatagactggcagcaatgtaattagtctatgttttggaaaacttccttgaaaacaacgttggttgtttgcttctgaagtttaccatctttgtctagtattaggaatttcaaaccctttttagaggtaaccctagacaaagcaacataaagctgaccatgggagaacactgctttgggcaagtaaagtcctacatgttctagagattgaccttgactcgtatttatagtcatagcgaatgcaacagagagtggaaactgtcttctacgcatcttgaatggaagtttagtgtctgtaggtgtaagattcactgtaggaatcaaaactatgtgaccaattatgtctcctgtaataactttagcttcaacaatctgagtacatagctgcgtaatctgaagcctagtgccattgcatagaccacctttaggatccaaatttcgtagtaacataacaggagcactgacctttaaacgcaaagaatggttaggcaaacctgctaacttgatactgtttaaaaaatctggagtgataacaggattgttaagtgaattagaatctgtaggatctatggaatcagcagatagataaattctttcctcggctgaaaaaaaaaacaaattgaatgtatgtcagttgtatattcaataaaaaaatagattgcatataaagattataaactttaaactgaagagtaaaagtgcactgaccatgcaactgctctagcaaatactcattgattgtgtttacgtcctcattcgttggtgctaatatagctctgccttgaaagaatttgggatcagtgatttcgtgtaggattttaggatctccataaatttcattggtgatcgattctattggcttgtctgtgttggtaatcaacaaatcttctggaatatctattatagccacaccgtcattaggctcatttatcctaccatcaccaacaaccaataaccaatcagaaaactcttgaattttttagcttcagtttcactcaaattgtttgctagtagtctcatgttcttagtcaactttaacaccttgcagtgatcccaaagatacgaagcattaagcgatgacattactatttctgctctccctgcaccattaattactagaagcacctgtctgaaatcaccacaaaaaacaacaacctttccaccaaaaaccttgttgtctgtgttttttataatgtgggagaaagatttatctaaagcttcaaaacaaaacctgctcatcattggtgcttcatcccatataactaaagacgcttctttaaccaaatttgccaaatcagactttggttttatcttacatacagagaactcatcaggattcaatgaaataccaaaccttgaatgtgcagtccgaccaccttctaacaacaaagaggcaatgccactggaggcgacgttaagaacaatctgatctctacatctaatagcagcagacaaagttttccaaataaaagtcttccctatacctccaaaaccgtacacaaaaaaagactccacctaaattattaaaaactgcctctgtaatctcattgtatacgcctctctgctcaggagttagcatttgtttccattcttcatgcttctcttttaggttggattcacgattatatcttaactcctcaacaatgagtctatttgaattatcaataccatctctagtaggcttaggaaactcatcaatatcttctaaggttgctccatttgacagcataattttctcgaaagaaacatatctggcctcatagtcggtctcacccttattgcagacataaggaaacctcttgatagaagaaacgcttgcaaccacaccaatagcatctatgaaaacaaaaaatcaaaagctagttattgtctgcagcagagtactcaaatataaactcatgaaatgatctaaagaattaggatcgttataaacataccagtaacatcaacaacattgtctgtagcagagtcctcaagttcattggggaaaagatagtctgtgaaatcagatttcactaactctgacattctgaacactacagtataatgaaactttaacttattgatacaagtatacactaaagtcattcattaaaagtctgaagccagtcgaatacatatatacaacatgaaatggtaagtttctttggaccctctaactgtaacgttataactgagattgcatgttttcatatagatggctacaaaattagtaatgatcgaacatataagcttaatagaataattttaagattaactccaaaattaaagatgaaacataatccaaaacatgaaatccaataactttgaaaaaaaaacacgaacataatccaataaaaaaaaaaaaaaaattcaaaacatagcttcagtgaccaaacacaattcaagaagcatcacttattaaaagaaatagataagtagatcacttgttcttctccactttgacccttacagcagccatgttcctagccatctctttcttgacttcttgtttcaccacgacagtagctgggacaagtgcttggtcattctctgtttcaacaggaaccattgatgttttgagtttagttggaacagtaacttcttttgaatcagccacctgcagattcaaggcaactccatgttcagcattcttagataaagacttttccaagtctaatggtacaacacacaccttctttgaacttgaagaaccttccgagccactcgtttctctagcgtaaacacgctttgaagatggagtcgtagagtctggcgatccattaccattctccagcataagtagaacctacaatatatagagttagaaattgccaaaactcttatgaactttatgattgtaatgaagaatgtaacttgatatgttgtgtgaaatacctgatcactagacacaatggatgcagggttcacatgttcagcagaatcctctagtaactgtttctctagtagtccatctttcagaagcacctttgaaaccttatagatttcttttccatccgagatgttgtctttctcaacccacaccagaaacagaaatgtcttaccaatcagattctttacagaatcaggaagatcttctggatcctcaatctggaagagtgtaaatagttatttgagttctctatatatttatatgtcagtatacataaagtagacacgggacaactttaagaaacatacctcattaacagatccattaagaacagaggttgcagactcgccaatgatctcaaagcaaattgaatcaaacagaaccaatttggcttcactagtgctatccataacctttgcatagatcatgtaccttgcatataataaaattttacgaacttaatttccaagctatacacacagttccaataaaatatttcaaagtagtatgctatgtaaatataatcttcaaagaaatgtatttacctagagaccacattggttacaacagacttgcaggtgtcacaccagaatttaggcttcttacccttgttgtttactccattaacaccagcatgaatatgattcactttcttattacatgtcttgcagctgatgtaataccaagcccaatccgtatcaattgcatagattgtgcacaaaactctgactttaccaacctatataaaatatcagaacacattagatactgatgatagttagatttctaaactttgagataagttagctgaatataacctcagtcgagctaagcagatcttcaatggtattccttgtgtatacactgtagtcaatccttttgactgcaaccatctcaaaacgtgggactcttgtacggtacacacaaatagcaccatcatttggaagtctgcatttggataaaaagatgatcaatagcacataaagaagtcaactaaaagtagattgtgttgagagtagatgcatttacgtttgactgaaatggtgagcttcagggaagtctggattgacatgtacttgtgatgcatcaaatgagttggataaactcttcacaccagcagtctcataacatttaagtgaccatagatcatgcagtatggaaagaaaaggaataggtacaaagaaactgaatatacccttgtaactcttaattttggcaaaacgaatgagaaaaatcacattctttccctcagattcctgacatgctctgtaaacctgctgagcgtatgttccccacaaagtaacttgcattctctcatccctatgagaacaaatgaatcgaaacaaacactttctttgataaccaataaacaaataagatcgcaataaactaataagatatagacattacatttgatctctgatctcaaagtcaatctttgttgtaggcttattgttagcctcgagttcctccaactcaccaacagtaatgatttggccaatagcatctgcagtgaaacatgactgtgttcataatctaatgatagcaagtgaatggaataaagcaaaaatataatatagaatcggaaaactcaccaaccaacatgtgagggttaagctcaccactctggatttttgaaaatggcgccaaagtcaagaagttggagtcagagacagaagcacaacccatgacttcagttctaacctggaacgccatcttgtatagatggttggttgggcgaaactggctagacgcataggtaagacgaaaaatctcaatgaagacccattcgccaacaataagcttgtgaacaaacttagaaaccaactccttcttcacggtagcatgcatttttttcccttatgacaaagacaacagaaatctatattagcacttgtgtatatgtaaacgtaaattttgcatagataacagtagttcttacatattcatcagagatgaccaactcaatggtttcacaggtgttgcttgtgtactgcttccaagagtgaagaatcttgacctggactctccatgcgtttttgtaaggcctcacgtctttaaggtatgcgaatgtagcagccatttctcaaaatgtataattgctttgatctctcgtttgcggtgtgagtgatgatgaaatgaaatgatatgagaagcgtatttatagtagccgagtgaatctttaaacatttatttgcaaagatttagagcgtaaattctttagaaacataatgattctgaatggtttagaataggaatatgcttgagtatcataagtgcaaaataataatcgaaatgccgtatttagattttgatttgattctgaatcaaactgtcgagatatggtagatgcatttgcccttatttttacgcttgtacattcaaaacagaatgatttggatggtttagaagatggaatattgcgtgatttagattatgtcttgactggcaagcgaatgttaaaagattttgtagttaaggtgatatatgtaaatcaggaaacagaattgctatgaatgaggaatggagaaaatagatgattgaatcggatagaattttgggaaggcaataatccataacaatttggataatattatagttggcgaaatttaattttcgaggtgatatattggaatttggaattgatgatgatttttagaatgtgtaaaaatatattgactataccatatgtaagattatatgatatattgaggaattaatgcatgattaataatcgtttaacttatagaaatgtgatatcgaaatatgaatatttggtaagagtgtagtaaatatttcaagattttggaatgaagtaagtaaagatatggttagttatttggttgttcggattttttaggaaatattatttcgtgtaatattgaattagtagagtttcaagggattaatgtgtgcaatttatgagggtagtacttaacaatttatatgtttaggcaagtaattagtgcaatacgtgaatagttgagcaaaaatttggttattgtcctaaagaaatatcttgtctgattgattttgtagggactaaacatacaatatcgaaattgaaaaaggatttttcggcacaaatcgtccccaaaaaagtatatgcagataataaaagcttataaaatacaaacatcttataaaaagcttataaacatctgataaaagacatcttatagacatattataaaagcttataaacatcttataaaaaacatatatacatccgataaaatatttataacatctcataaaagcttataaccatctattaaaaatattaaggtttataaaacttattaagtaatacaaaagcacttctttacatctaataaaaaaatcttatgttattaaattttatcataaaaaggttatatgagaaaatcttataaacatcttataaaagcttataaacatttgttttgatcctgccattcttataagcttttataacgcttcttctaaaaaaaaactatgggtctatttttctactaatcaacagcgagtttgagagtattattcctctagatgcgaagctttatttttccaaataattttttttttgttccgcgttacgttcctagatggaataaacttttttacaagttaatgtaattcgattttctgagactaaagaagtttgttactttgttttccaccttagtaagcttaagttaggcttttgttctaccttagtcacatttggcacttctattaaacacaccaacaaagaactaagaccaaattacaaaataaaatcgaatttgttttgcaattggtttggtttaaaaatgttttcaagcgaactaaacaaaatcgaaccgaagtaaaattttaaagagactttagcaaaattatgggaaacttttgttcttcgaagacttcattgtgcattccactccttatacaagtaaccactcactaggacctgcacattgcaagtcgataacttgttttagagtttcatcatctccgcaataacttcagacacatcatggactctgagttgtgtaggagcattctcttctatatagatctttatatccttcaaacatgaaaaatagtataagaaatgctttatcatgtgcatctctttcattgttccttgaaattcatcaatctctaacacttttactggacaagatgtgagtgaacgacctttgtcctctcgagaaacgcagtcacaagcatccccacatttatttgtaacatggtgcaagagaccctaaaagcataaaggaaacaataatcagttgtgctataatctaagaactctatctctgttcacgtttggcaaatgagtttattacaagataaggattgagctgagctagagagaaaacttgttaagatttttgattcttatttcttaaagagtaaagtgtacaacaatttccttatatacaattgttctaacttaaccagtcaattaaagtctattctaactaaaccggatggtatatatactccaagagtccccctcaagatgaggcaaaaatattatgaagactcatcttggacataaggtaagagaactgatgcggaaataatggtttagtcaagatgtctgcaacctgatcctctgtccgaacatgcaacattctgatgagacctttatccaagcgttctcgaactaaatggcaatcgatctcgatgtgcttcgttcgctcatgaaaaacagggttggtagcgatgtaaattgcagcggtactatcagagaagactatggggactgaccctgtgatgatcttcaagtctaagagtaaagaagcaagccataccatttcacaggaagccaaggctaatgctcgatactctgcttcagcagaagatcttgaaacagtgggctgtttcttggacctccacgtgatcaaagaagaaccaaggaacatagttaaccctgtagttgaacgacgagtgtcaggacaggttccccaatcagagtctgcaaagcctttaagggtaaggtcaggatcagaagagtagaaaagtccctgtccaactgtacccttaatatattgtaaaactttgtagactgtagtcagatgtgaagtccgtggagcagctgagtattgacaaagcttgttcacagcgaaagtaatatcaggccttgttatagtgagatacatcagcttccccaccagactgcgataaaactcacgatcctccaacaattctccatcagcctttgaaagtttcagatttggaaccatgggaatagtagaaggcttgcaatccaacattccagtgaaagcaagaagttccaaagcatacttacgttgacaaatggatatgcctgcagcagtcctagcaatttccagacccaaaaagtacttcaaagggccaaggtcacgaagcttgaaactctccttcagagcattggttaactgagctgcaacaccctctattgtgctagcaataacaatgtcgtctacatagaccaagacagcaagaaactcaccaccaaagcagcgaacaaacaaagtgtgatctccatgtcctttaataaaacccaaatccaacagacaattagaaaatttcaagaaccattgacgagatgcttgtttgagaccataaatcgttttcttgagtcttaacacaacattctttggcaattggtcccccttattgtctgcataaccttcaggtaaacgcatatatatatcctcctccaaatctccattcaaaaacgcattagaaacatcaagttgagtcaaaaaccacttcttagatgcagaaatcttaagcaacattttaatagtagccatttttgcaaccggagagaaggtgtcagtataatccaaaccttctttctgagtgtaccccttagcaaccagcctagccttatgccgctcaagactcccatcagcatgaaacttcagagtaaaaatccacttacaacccactgccttctttcctttaggtaaacttgtaacctcccaagtgtctttctcttccgtcgcaccaattttcgtatcaatagcatcacaccactctttagaatcctttgcctcagaatatgattgaggaattggaattttagtgatgttattaatgtataacaagtgagagggagagatttttgagtaggagatgaaagaagaaatgggatgagtgacttcattgtttaaagaatagcaatgatagtcatttaagtgagcaggaagtttgcgtgctcgatgggaagaaatttgtgttgatggagaaatttgtgatggagagggagaaatggaattgggattacctcagggcaaagaatccattggtgtgacaagggatggagagtcagcagagtgtggtgatgccattggaaagactgtctcatgaaaggtaacatttctggaaatgaagactttattgctttccaaatccatgatcttgtaccctttgtagctagacggttaacccagaaagatgcatgcccgagctctaggctgaaacttgtgacgttgagtaggagaagtagaaccataacatagacatccaaaggtgcgaatctgctcataatcaggtttcttacctgtaagaacctcaaatggagttttattagaaagcaattgagatggtgttctattaataagaaacacagctgtcaatatgcagtctccccaataaggtaaagcaaccttggattgaaacatcaaagctctagcaacgttgagtatatgttgatgtttcctttcaaccactgagttctgttcaggtgtctcaggacatgaatgataagaaactatccctttagccttgtaaaactcagtaaatttcaattcctgtgcattatcagatcgaactgccttaactttgacgttgtactgattctctacacgggtgacaaaagccggaaacacactaagaacctcagatttagtcttgagtaagtaaacccaggtagctcgtgaatgatcatcaacaatggtcaaaaaatatttaaaaccatcaatagtctccactgaaatgggtccccaaaggtctatatgtaataactcaaaagttgaattacaaatattgtttgaagactgaaaagacaacttcttctgcttagccaaatgacaaatgtgacaataagcagatcctttattcttgtgtttagtagtcctcaaaatgtctgaaatagcatccagtcttgagtaagctggatgtcccatcctcatgtgccataaactaacatccaccaccgcattaacagagactgaatccaatggaggtgtagtatccaacacatagaggttgccaatgcgtctacctctgccaattctcaggtccttggtaagatcctgtatttcacaacatgacggatcaaagatcactcttgaaccaatatctgaagtcaaactactgatgctgatcagattcaaacgaaactcagggagaaataaaacatttcgaagaagaatgttttcatttatctgtactgaacccactccactgattttaacacgtgatcctgttgggagattcacataactcaccacagaatgatccaaagaaacaaataggctcttatcatggcaaacatgatgagttgcaccagagtctatcacccaagtttcagtggaaagagtatgttgggatacattcaatataccaacaaagtagtatgtagagttagagaatgagataccagtgtaatcaataggagaacgtgaaattccagcatctgaagaagaagcagttggttgtgacttcagttgagaactgaacaaggctatgaagttctgaagttgatcattggagagattaccaagcagaccatctagagtagcctgagttggaaccatcggaggcaataaagagacctgagcagcaaccggttgaggtttggtacccttctctggtagtttgcctttaaaaccaggagggtaaccatgctttttgtaacatttctctgcaatatgtcccaccttgttgcagaatgaacagattggacgccctttattaggtccattctgaacatagcaaatcttaggagtcaaagcagtagaagatatcttagagacctgaaaagcagcaggaggagaaacattggtagagaaacctttctgactgtaatcctggtcaagaatattgtaaacttcaaccagagaaggcaaggctttctttgcaatgatctgtctcctgactatagagtaggactcattcaaacctgccaagaatttgacagttttagctctctctgccttctgttgcagacgaagaactttaccacaagtacaaggatcatcaggttcctctgtactgtccaacaaatcccaaagaatacgcaactgagtatagtactcagatagagaaagagaaccctggcgaaaatcctggatctcctgtgtcagattgtacgtacgaggaagattagtcatatgaaaacgtccataaatgtcacgccagatatctgtagcatcattcatgcgtagaatgctacgataaatctgcggagacacagagttcaacaaccatgatttcaccatactattacatctggaccaaaggcgaaagttcccatccgattcaagtggacgaggcaaagaaccatcaacaaaaccaatcttattcttagcatctaacgagatccgcaacgctgcactccaatcatcatagttagtctcatctaagcggatagagacgagattcaaacctggatgatcaccactgtgcataaaaaacggagactgagtcggatccatggaatctgaagtcacaacagctcgcgatgcgccagcagagagcagatctacagctggaggagagatcggaggagagactgtgagaccagtggatcgcgacgatttccatggaacggagcttatcgacgcctttgaacgagtggatttccgagttactcgagcaacagccaccatctttacagaaaaacgagtagtgaacaagaaaaaaacgagatcggagaagaagaaatctgatcggaaacaacaaaaacttagctcgttggctctgataccatattacaagataaggattgagctgagctagggagaaaacttgttaagattttcgattcttatttcttaaagagtaaagtgtacaacaatttccttatatacaattggtctaacttaaccagtcaattaaaccggagaataatctattctaactaaatcggatggtatatatactccaagagagttgttattatacctcaagagcgtaaaggtttagaacgaacacaagattcttgagctgcgaaggctgaatgaagaggtggacaaagagattgctctgagtaagtcatgtgcagcgaagattgttcaacagcttgaaaatgtgaagcatcacagttgcagataagtaagttgttgtctcagagataggcaagcaaagaaaatggtgtaacttgaaggtgctgagaaagtgactgcagaaaaagagagcacaaagagttaacggcgattccattatctgcaacattaaacaaagataaaaaaaagaagaaattttcacagaagtggacgaaaaaagatttgccctcaccgtttgtcaaagtgagaactggttttcacggtttctcttttcattcaatttcggaccaaattaccctgggaaaacttaataatggcacaaaccaaaccgtgcaacagttcgtatcggttcagttgacggcgtaaaccaaaccctacagcagttggttttggtttagttgatgcggttcagttttgaaaaagacaaaaaaaaaaaaaaactgaaacgaagaaacccgagaaaacgaaaaagagaagagagtaacggagagatttgagagagaatcagaaagcgaaacgaaattcagtatccattgcttcaaaattcgacataacttcgaattgttgggtagttgaattgagccactgaactcccacatccggggaagtgaaagttactgtttttcccggcgaagccaagagaaagttactttttattccggcgaaatttgaacctccggcgagatagcatctttagctatggctgggaataaagctaacgacgaagtcccgaggaagcagcatggtcaaaggaaggagaagcgggtattaagagtttccccgcggagaaaacgctctgcaacaaaggcaacggaggaactgggttagaatctctaatttaccgtttgttgtctttgggtgtatcagaattgtaaagcttgtttgattaaagggttagaacttgtcggaatttagcatatctttaggatgaaaaattgagaagtagaattggaaatctctgtttccgccaaaaatatgattttgagttataatctggaaaatgtctgtgtacgtacactacttcggtttgcttaacagtatatgacttttagttgcaggtagtccaagtgttgctccgactgaagatcttacagttgaagagttaccaccaagactctttgctctacaccggtacccttccgagacgaagatgaacgcgtactctaaaccggagtacatttctgacatagaaaatgtactaaaggggaaaccagagatgcagtttcttctcgattctccatttggggaactttttaaaatacccaaaaacaaggcatctttcaatgctaagcttgtccttggactaatatgccgtcagttagtgacaaagaaggtgaatgagatgtggattgtattcggcggtcatccaattagatttggattaagagaatttagtatcctaactgggctggaatgtgggaagtatcccaagaagaaagacgttgatgatgttatcaatgtgaaacctgagtgtgagagtgtttggaatactctgtttgatgagaggtttggggacacggttccaacaattgctgatttggtgagctggctgcaggaggaggaaagcatggaggggtggaagcaactggcactatctcttattattttggttgacggtgtggtagcggcccacagtaaccccaacaggcctacttcgaagactgtcgagatgactaagaacctgaagttcttctgcaaatacccatggggaagggtgtcctttacccgtactttggggaggatagcaaatttccaaactccttacgatgctcaacaactaataagggatttacttgtagggtcttatgcactccatggcttcccattagctctccagcttttagctttcgaaacaatcccatcaattgctaagctaggacctgatgatgtacttaacaggacatttgctgagaggtctatccatcgtcttgcctctctgcgagcaatccggacatctcgcattttggagtgtgaggctgctgatgaggtgtgttaaattgtgtatgtacgtacataataagtaaatgtacattatctatggttaacatacttatttgtgtaggttgaggtcaactatattgtgaaaccagctgataatgtttgtcctccatctctttcatgggatgatgaagttgatgatccaagggttgattacattgaggcactgttgatagatgggcaccagtggcaggaggatgaatgggttggaggctatgctagagtaccaaagcaggtgcgcccaccacaactagaagagacaggtaagtataagtataaaggttgtttacaaatttttttggtattgcatccagaagaaacccaattaatagcagcaactggtctattgtagatgttaagagaaaacgaaatgcaccgggcccgagccctaaagaacctgataataagtttttagtcaattattcctaaaacaccaatcatgtcgttgtagtaatttagctgtcaatccaaatgggtgtgatgcaaacagatgagatgtgatcagaagtcactaagtcaagccaagcaataacagttttggggtttctaacagtcctaagcgaacatgcagaaaacagaagcaataacagaattactaaaatcactcgaccacaacaggctgatgccagaagtaggatgtggtcgagtaacaggtcaagtaatagacaggatatgaaacagctatactcgactgcacagtctgttgccagacactgggtgtggtcgagtaagttggtcgagtgattgtaaaaactaagaaacaagcaatgagaacgattaagcgataacgataaaacagagaaataagatagacgagaaattcctaaggatggggtaatcgagtagagtggtgtcctagcctattcgaatggttaacaagcgcaatcaagctatccctagacaacaggttcaacaacagaccaattcactcccgtgatagaaatcctcaagcaaagctagcccagactaattcccattaacggaatctaactatgcaggcaatacgaacagactgataaagtcaataaacgctctaaacggccaatcccttgggatagagacgcatatctcaggaactagtggatcaagcattccatcgaacaccttctgggtgcgggaatgcttgggatcgaattccagttgatcagaaagaaataagcagtaaacgcaactagtcctaaagggattcaatcaattctgaaacttaaccattctacagactacggattccacaactactctatcccatccctaagaattctaagtcactactcagacaacatgctcaaagacataaacgcagataaacgataatattgcataagtaaagagataaagagtagagaaacaagatgactaatgaaatcaaacgcggaatctcaataacttggaaaaatcgcgaactacaggttgcagaagcaaaagcggcgcagcagagtaaaactgaaaataaaactgaagcaaaaacgcaatgtcgactagatgtctcaggacagaaccctaaaacatctatttataccaaacgaaataaaatgatagtagacgggccaataacctaatcgcccggcccatagagtgataatgggccgagatgggcttcgtgatccgatggaggtccaggccgcttccaaacactttgtcttctcctcttctcttccttgtgctcagcttatctggttgagtgcggatttgagtagactgtgaagaagtgatcgagtgtccggtcgagtgatggtgatggtggtgagtgatgatactcgaccatggggtcgagtaacgtggtagagtgaatggtcgagtgtagtcaggtggtgtggcgaagtgagactcgaccagggggtcgagtaatgtcatcgagtggcctgagctgacgttactcgacctggtggtcgagtggatgggaagaatggctccaaagtcactcgtcctgggggtcgagtatgtcttctcgttctggctcgtttcttccaatttgctcgcaaacagctccaaatcacctgaaaacaactcagaaatgcaatatgcatgcaaagctatcctaatcatgcaaagtatgcaagaatgatgagaaatgatataaaacagtgatgaatgatacgaaactggactcaaaacgatgatgaatggacactgaaaacatgcaaattatagacatatcaactcccccaaacttagtctttgcttgccctcaagcaaataggaagacatagttgaaggagaggagtaaaggcggggactcagaaccaaagcatatgatagagcaaataaaatcaatgtccaagttggtagttctaagatgcgatatgattgaattctactcaaaaaacgttagtcatgccttgttatcaataaatccgtctcttatactcgacctacacatgttttcaaatctaccaatccctttaacattcattagttctggaacgtgaatcaagcaatgcatcatcaatgaactcatttggctaaggtgaaggtcaagagacaaagatggtcccctacagaataggcttaagtaacaggggatccctcaagaatgattgagctttagtagaatgctaaaggtaagtcccaagttatgcatacagagataagatcccatctacccagagtataacaatgaagctctaatggtaatcccaactcctgtcccaacttaactctaccctttgcactcatgaatctttcaaactcttttttccatatcattcttttcttttctcttaactctaggagaagctttctcaacgctcttgatacatctagcgggtttggacttctttaacaactaaggttcctgttttttttttttctttaacaccaaaggcttttaacccttcttctttagctaacaagaacctcattcttttctttaacattcccaaaacctttactagattttttttcctaacttctttagcttacttcccctagaattctttccctttcctcatcaacaacgaattccctcttttcttttaaacacatcccaacccctgatataagcgccctcctagtcctatccagtccgaagaacgcgaactagaactacatgagacactatctctgtcgttacgaacctaacactttctaccaagctcaatcgaaataagacctcacgaacactcacaagtgatatagggcttgaaagaaagttcaggtttgggtatgggttaactgctctaataagaagagtcagctacttggatcaacaagagtggttaaaatgagttagaaaatccaagtattttagggtatccatgagttcaaattcgatgccaagacatgataattctaaatcagattcaagttcaaattgatagggaatgatatcagatcctaacagtgtggtcgagtagagcaatctaggcatggtgcagttcttacttcaatttcaatgacaacgcatcaaacaactaacaacgagggcactgagcttatctggtgaaccaaaatgcttacaaggctatctcatcattatcccctatgcatatgcaacaatcctaaacgaaacactctagactcgatcctaaatgcaatgcaactacatgaacactctatttttgtgaaatcattttctggaatttttcaatttttttggtttttctatgccttagatgaatgcagactcaagattatacaatgcaacacacacttcctgagccctcccccaaacttaaatcacacagtccactgtgtgaccaaatttggaagagagtactcaggacaaaaacacatcacaaaaacaaaataaaaacaagagatggtatattacaatggtggagtgaggtgcatacctcagtggaagaaggagcggagttggtcgtcaatagctgtctgtgattgctcccaggccatcgaagaatctccctgttgtgtcccagcttccccctgggggtactcgacctctgctccttcgtcgcggccagcaccgctgtgatgatactcgacctctcttcttctgctgcggccaccaccgcggtcgcgtaagctacgggagtggagaagtcgtgactgcatcattcgctatactcgacaatatcgtcattcggtctttatagggtgtggtcgagtgatttcctggtgtgaagacgccagaacaatgtcgagtttgattgctttgtggtcgagtgtattgctgttccttcaaagccagaatctatttccatcaactcttcatatttatctcctgaaaacactaacaagatgcatcaaaaacaacaaggaaaatgaaagatatgtgcaaagataggcttgggacttcctcccaagtgagcttgttttaggtctctagcttgactcttcatactcattaggcgtttaaaggctcctccaaaggaacagaggttccttctggaataaactgatctatcatgtatttcttgagccgctggccattgactgtgaagtctccattctttccagctagagtgatagcaccataaggtcggactgcagtaacagagaaaggaccagaccatctagacttgagcttgcctggaaaaagcctcaggcgagagttgaacagcaacacttgatcaccaaccttaaaatctcttgagactatcttcttatcatggaaagacttggttcgctccttgtagattttggaactctcataggcttctaagcgaatctcgttgagatcgttcagttggatcaaccgcttctcctcggcggttttaatgtcgaagttcaggagtttaactgcccacatggctttatactcgagttcaacaggcaaatgacaggattttccataaaggaggttgaaaggagtcgtgccaataggggtcttgaaggctgttctgtaagcccatagtgcgtcatcgagcttagcagaccaatctttccttgtacttcccacaattttctctaaaattgcttttatctccctgttggagatttccacctgcccgctcgtctgtggatgataaggagtggcgaccttgtgctttactccatgcttcttcaaaaggttctcaaaaaccttgttgataaaatgtttccctccgtcactgatcataattctcgggactccaaatctaggaaagataattgtcttgaacagctttagcacaactctagcatcattggtggggctggctatggcttccacccattttgatacatagtctactgcgaccagtatgtacttgttcccgtaagaggaaggaaacggacccataaaatcaattccccaaacgtcaaagatctcaacttctaatatcggattctgaggcatctcattccttctgctgatgttccctcttctctgacatgaatcacatttcgagataaattcctgagcatccttaaacattgatggccaccaaaaaccagcttgcaggattttcgacactgtcttgaacgttgcgaagtggccaccataggcagacccatggcaatgcaataggatgccttcgatttcgtcttctgagacgcatctcctgtagatcttatctttgcagagtgtgtagagataaggttcgtcccagtagaaatggttaatgtccttgaagaacttcttcttctcatagctcgacagattcggaggctcctcaccactaaccaagtagttgacgtgatcagcataccacggaagcttttcttcaattgtacatacttgatcgagtgatttccgaatttgtgcactctcgttaagttgctgaattgccattagctgttcttctggcatggagtcgtcaatagggacctcgtcttcaatcctcatcctagacagatgatcagctacaccgttttcaattcccttcttatcaactatctccatatcaaactcttggagcaataagatccatctcaacagcctaggtttggtatctttcttcgcgtatatatgcctcagagcagcatgatcagtgtagactgtcactttagaacccactaggtagcttctaaatttttcaaatgcaaataccacagctagcagttccttctctgtagtggcataccttacttgtgcatcatccatcgttctgctcgcgtagtagatcacatgcagctttttatcaatccgctggcccaagactgctcctactgcgtaatctgaagcattgcacatgatctcgaatgggaagtcccagtttggagcttggactattggtgcagtgatcaaagcttccttgatcaacttaaaggctgtcaaacattcgtcatcaaatgcaaactcggtttccttgcacagtagtctggtgagcggtcttgccaacttggagaaatctttgatgaatcttctgtaaaatcctgcatgtccaagaaaactcctgatgtctttgacagttttgggtggctgtaactgcatcatcacgtcaaccttagccttatcaacctctattccctcttcagaaattttgtggcccaaaacgatgccttctctaaccatgaaatggcatttctcccagtttagcactaggtttgtctcttcacatcttttaagtaccctgcacaggttcaacaaacacgaggagaaggaagagccatacacagaaaaatcatccatgaatacctctaccatctcctctatcaaatccgagaaaatagaagtcatacaccgctgaaaagtagctggtgcattacagagaccgaaaggcatacgcttgtaagcaaaggtcccataaggacaagtgaaagtggttttttcttggtcatttgggtgaatagggatttgaaaaaatccgctataaccatccaaaaagcaatagtaaggatggtttgctaatctttctagcatctgatcaatgaagggcaatgggaaatggtcttttctagaggcagcatttaacttcctatagtcaatacacatcctatgtccagttgtagtcctagtgggtatcagttcatctttagaatttttaacaactgtcatacctccttttttaggaacgtagtggactggagatacccaagtgctatcagagatagggtagataaccccagcatctaatagtttaagtatctcctttttgacaacctctttcaagttagggtttaatctcctttgaggttcaatgctagagtaggattcattttcaagatggattctatgggtgcataaggtgggcgaaatccccttaatatcatctaacgaatatcctatagctttcctatacttcttgagctcggttatcagcaggtttactt

SEQ ID NO: 1480 - DNA, 67286 bp, Arabidopsis thaliana
ctgggtgtacaacagatcggaaagcaaaacaattattgcaaaatgctattatggttcttgataaaagacattaagtatttgatggaacatccaaagatgactatcttacgtacaaacatccaactaactacacgtagggcaaaaacgaaagaataaacactcatcgagcaaagactatagtctctatcaactagtaaattttcaaaagttcgtgaagaacacggcgaaaatcgaaaacaaaaaaaactcccctattttcgagaaaattcaatggatagtgaaagatgttaaaagtctctgatgaggaaattgctctgtattcattctaatataaaggcaatgtagttacaacgtattgagaggtttcttagatagtcggaaaaacggcgaaaatcaacccaacctttttgctggcggtttttttcaacccgaactttaaaaccctgtatttatccacctaaactacaacctatttcaaattccaaacctcaactacataattgttagccgatttcaacataacttgtgacggcgttatgaaaccgttaaaccgtgctgagtcagcgacaccgtggcatcagagctgtacaaaacgacatcgtttaacgtggtttcggttgtctgctagagagaaaacgacgtcgttttcaattgggaaccctccgctagagagaagagggttcccaaaatcgttttctcaattaccatcaaccagggaatgacccacaaaaggtaattttgcctgactgatcatgaagaatgcctcttctaagtaatgcgtttcttggttgacgactctttgaagactgcttggaggagcttagaattccactgcatgtctccaaagacttgttcatagccttttgacggtcgtttgaagcattgttgcatcaatgtcgtccttttactactaggatcaacgtaaaaatttaactaaacataaaaaattaatggaaccaaattcatcaattataagaggaaacgagtaaaccttacatggtctttaaatataacaattattgggttattgctttccggctttgactttgccaaatatcttattatacaaagttgagttttcaaaattgttaactcacctgatcatgacacgtgtcaaatttattcatgagttacccacacatatcaaataaattttgttatttttaaggttatgtgcaaaaagaaaaactctctaactcatctattgttgcatatttatcctccacctccagaaaatgcataattatccgatgaagttaaaaataatacgcaatgtaacccctttttcgtcatttttttctacgataaatattttgtaaaatattgatatttaatatgttaaatcgaagccttctcggcaaaaagttcagctctacctacaaattcttttaaaaatctaatgtatgtgagtgtaaataaggttacaatatacgtataagggtcatattgcgtattattttagacttcataggattaatatgtgtttgttagagatatagggtaaaattgcaaaactagatgagttagatgggtgttttgcacaaaaccctatatttttaaaaacaaaatatagaaacatttcataaccccatcggatatatagacaagtaaaaaaaatagttcatatatacaaatgttttatttagtatattaaaatattgaacaaattctattaaaaatcgtttatatattcaaaacagaagtaaaagttccctattttgttttagaaaaatattaatacgtgatttaatattttctaattttgtaacttaaatatgtctctctttttatttcttaatattatttcatttcatttttttctcaattacagagttctattcgtttaccacaaaattcagtgagaggctctgtctggtgcgtcttttatagatgttgtatgttttccttgtcttatctttcttttatactttgagaaatcccgtattatatataattagtaaaggcatggtatatagaatgtatataattgaaatattcttttcaaaaatactgattactatttagaatttttatatcatcacaacatttctcacaccagcatatttagacgagtcttatctaataaaattataaaccactctcagattttgtgttatgacatattttaaagatttattgaaacaatttgaaggtctgtaacattgtaagactaaattgaattatggactcgatgtttcaaggtgttattcattagaattgaagaatgtataaacatggaacccaaatgcaacttctcaaatgttattactatatcttcttctttttttaattattattataacatgtaacgtaagctaaaattttaaaaaaataatttgaaaaagttatctattttaaaaataagataaaacactattttggtatgggaggagttgcaccggcaactcttgaacattgttcctttagcatcggtggaatgaatggaattttcggtatgcaattatcggcgtccagaaatgctttgcaacaagtcggacctaaattaccgaactttccagtgaaaatggattgagaaatctctgcaatgcatccaggaatatccatcacggatgagaaacattttgttatatcaggtaatccaggaatcagttggaacggaaacagaaaaggaagctgagccggaaactgaggcaattgagcatttacagaaactatgatacatagaaccgctagaagtgaaaacacatttttgatagacataatgagaaattgagtaaaaagtcttagtatagcaacaatatgcttaatgctttgtttgtttttgattgatgaataacaataaaatccttgcttatttatatggattgaaatgtgaaactgtcatattaattttttttaagttaacatctttgaatacgttaattaggtatttgattagccgttttagaaatttaatatagttgaaactccatgtgtgaaacacgtaacattaactaagaaatattgactacaaagagaaaataaaagtaaaatggcttcacataattaatcaatcatcggtttatatctccaaatttaaacaaataaatcgatttataatattttcttcgtgaaattatttgaatcaatctaaaggtttggtttgtaaaacttctatacaatgaggttctccatgacttgttaacactaaacttagaggagaagagtttctggatagcgggttaaacggttgggaagagcagttcggatctggcatgaaaacaatgaacataatccaatatatgtgccaaatatctacataaagttgggctttcaaaattgttaactcacgtgatcatgacacatgtcaaatttattagtgaaatatctacccttatcaaatcaaattttgttatttttagggttttgtgcaaaataaaaccctctaactcatctatttttgcatctttattctccacctccaaaaaatgcataattatccgatgaagtctaaaataatacgcaatgtaaccccttttcgtcatttttctacgacaatattttgtaagatattgatatttaatatgtttaatcgaagccttctcgacgaaaagttcaaatcgaccttcgaaatattaaaaatctaatctatgggagtgtaaaaaagtttacaatatacgtataagggtcatattgcgtattattttagacttcataagattaatatgtgtttgttagagatatagggtaaaattgcaaaactagatgagttagatgggtgttttgcacaaaaccctatattttttaaaaacaaaatatagaaaaatttcataaccccatcggatatatacacaagtaaaaaaaatagttcatatatacaaattttttatttactatattaaaatattgaacaaattctattaaaaatcgtttatatattcaaaacagaagtaaaagttccctattttgttttagaaaaatattaatacgtgatttaatattttctaattttgtaacttaaatatgtctctctttttatttcttaatattatttcatttcatttttttctcaattacagagttctattcatttaccacaaaattcagtgagaggctctgtctggtgcgtcttttatagatgttgtatgttttccttgtcttatctttcttttatactttgagaaatcccgtattatatataactagtaaaggcatggtacatagaatgtatataattgaaatattcttttgaaaaatactgattactatttagaatttttatatcatcacaacatttctcacaccagcatatttagacgagtcttatctaataaaattataaaccactctcagattttgtgttacgacatattttaaagatttattgaaacaatttaaagttccgtaacattgtaagactaaattcaattgtggattcgatgtttcaaggtgttatttcattagaattgaagaatgagtaaacattgaacccaaatgcaacttctcaaatgttattactatatcttttttttttttgtaattataattataacatgtaacgtaagctaaaattttaaaaaaataagttgaaaaagttatctattttaaaaataagttaaaacactattttggtatgggaggagttgcaccggcaactcttgaacattgttcctttagcatcggaggaaaaaacgaaatgaatgaaattttcggtatgcaattatcggcgtccaaaaatgctttgcaacaagccggacctaaattatcgaactttccagtgaaaatggattgagaaatctctgcaatgtatccaggaatatccatcacggatgagaaacattttgttatatcaggtaatccaggaatcagttggaacggaaacggaaaaggaagttgagccggaaactgagacaattgagcatttacagaaactatgatacatagaaccgctagaagtgaaaacacatttttgatagacataatgagaaattgagtaaaaagtcttagtatagcaacaatatgcttaatgctttgtttgtttttgattgatgaataacaataaaatccttgcttatttatatggattgaaatgtgaaactgtcatattaattttttttaagttaacatctttgaatactttaattaggtatttgattagccgttttagaaatttaatatagttgaaactccatgtgtgaaacacgtaacattaactaagaaatattgactacaaagagaaaataaaagtaaaatggcttcacataattaatcaatcatcggtttatatctccaaatttaaacaaataaatcgatttataatatttttttcgtgaaattatttgaatcaatctaaaggtttggtttgtaaaacttctatacaatgaggttctccatgacttgttaacactaaacttagaggagaagagtttctggatagcgggttaaacggttgggaagagcagttcggatctggcatgaaaacaatgaacataatccaatatatgtgccaaatatctacataaagttgggctttcaaaattgttaactcacgtgatcatgacatgtgtcaaatttattagtgaaatatccacccttatcaaatcaaattttgttatttttagggttttgtgcaaaataaaaccctctaactcatctatttttgcatctttattctccacctccaaaaaatgcataattatccgatgaagtctaaaataatacgcaatgtaaccccttttcgtcatttttctacgacaatattttgtaagatattgatatttaatatgtttaatcgaagccttctcgacgaaaagttcaaatcgaccttcgaaatattaaaaatctaatctatgggagtgtaaaaaagtttacaatatacgtataagggtcatattgcgtattattttagacttcataagattaatatgtgtttgttagagatatagggtaaaattgcaaaactagatgagttagatgggtgttttgcacaaaaccctatatttttaaaaaacaaaatatagaaaaatttcataaccccatcggatatatacacaagtaaaaaaaatagttcatatatacaatttttttatttactatattaaaatattgaacaaattctattaaaaatcgtttatatattcaaaacagaagtaaaagttccctattttgttttagaaaaatattaatacgtgatttaatattttctaattttgtaacttaaatatgtctctctttttatttcttaatattatttcatttcatttttttctcaattacagagttctattcgtttaccacaaaattcaatgagaggctctgtctggtgcgtcttttatagatgttgtatgttttccttgtcttatctttcttttatactttgagaaatcccgtattatatataattagtaaaggcatggtatatagaatgtatataattgaaatattcttttgaaaaatactgattactatttagaatttttatatcatcacaacatttctcacaccagcatatttagacgagtcttatctaataaaattataaaccactctcagattttgtgttatgacatattttaaagatttattgaaacaatttgaaggtctgtaacattgtaagactaaattgaattatggactcgatgtttcaaggtgttattcattagaattgaagaatgtataaacatggaacccaaatgcaacttctcaaatgttattactatatcttcttctttttttaattattattataacatgtaacgtaagctaaaattttaaaaaaataatttgaaaaagttatctattttaaaaataagataaaacactattttggtatgggaggagttgcaccggcaactcttgaacattgttcctttagcatcggtggaatgaatggaattttcggtatgcaattatcggcgtccagaaatgttttgcaacaagtcggacctaaattaccgaactttccagtgaaaatggattgagaaatctctgcaatgcatccaggaatatccatcacggatgagaaacattttgttatatcaggtaatccaggaatcagttggaacggaaacagaaaaggaagctgagccggaaactgaggcaattgagcatttacagaaactatgatacatagaaccgctagaagtgaaaacacatttttgatagacctaatgagaaattgagtaaaaagtcttagtatagcaacaatatgcttaatgctttgtttgtttttgattgatgaataacaataaaatccttgcttatttatatggattgaaatgtgaaactgtcatattaattttttttaagttaacatctttgaatacgttaattaggtatttgattagccgttttagaaatttaatatagttgaaactccatgtgtgaaacacgtaacattacctaagaaatattgactacaaagagaaaataaaagtaaaatggcttcacataattaatcaatcatcggtttatatctccaaatttaaacaaataaatcgatttataatattttcttcgtgaaattatttgaatcaatctaaaggtttggtttgtaaaacttctatacaatgaggttctccatgacttgttaacactaaacttagaggagaagagtttctggatagcgggttaaacggttgggaagagaagttcggatctggcatgaaaacaatgaacataatccaatatatgtgccaaatatctacataaagttgggctttcaaaattgttaactcacgtgatcatgacatgtgtcaaatttattagtgaaatatccacccttatcaaatcaaattttgttatttttagggttttgtgcaaaataaaaccctctaactcatctatttttgcatctttattctccacctccaaaaaatgcataattatccgatgaagtctaaaataatacgcaatgtaaccccttttcgtcatttttctacgacaatattttgtaagatattgatatttaatatgtttaatcgaagccttctcgacgaaaagttcaaatcgaccttcgaaatattaaaaatctaatctatgggagtgtaaaaaagtttacaatatacgtataagggtcatattgcgtattattttagacttcataagattaatatgtgtttgttagagatatagggtaaaattgcaaaactagatgagttagatgggtgttttgcacaaaaccctatattttttaaaaacaaaatatagaaaaatttcataaccccatcggatatatacacaagtaaaaaaaatagttcatatatacaaattttttatttagtatattaaaatattgaacaaattctattaaaaatcgtttatatattcaaaacagaagtaaaagttccctattttgttttagaaaaatattaatacgtgatttaatattttctaattttgtaacttaaatatgtctctctttttatttcttaatattatttcatttcatttttttctcaattacagagttctattcgtttaccacaaaattcagtgagaggctctgtctggtgcgtcttttatagatgttgtatgttttccttgtcttatctttcttttatactttgagaaatcccgtattatatataattagtaaaggcatggtatatagaatgtatataattgaaatattcttttgaaaaatactgattactatttagaatttttatatcatcacaacatttctcacaccagcatatttagacgagtcttatctaataaaattataaaccactctcagattttgtgttatgacatattttaaagatttattgaaacaatttgaaggtctgtaacattgtaagactaaattgaattatggactcgatgtttcaaggtgttattcattagaattgaagaatgtataaacatggaacccaaatgcaacttctcaaatgttattactatatcttcttctttttttaattattattataacatgtaacgtaagctaaaattttaaaaaaataatttgaaaaagttatctattttaaaaataagataaaacactattttggtatgggaggagttgcaccggcaactcttgaacattgttcctttagcatcggtggaatgaatggaattttcggtatgcaattatcggcgtccagaaatgctttgcaacaagtcggacctaaattaccgaactttccagtgaaaatggattgagaaatctctgcaatgcatccaggaatatccatcacggatgagaaacattttgttatatcaggtaatccaggaatcagttggaacggaaacagaaaaggaagctgagccggaaactgaggcaattgagcatttacagaaactatgatacatagaaccgctagaagtgaaaacacatttttgatagacataatgagaaattgagtaaaaagtcttagtatagcaacaatatgcttaatgctttgtttgtttttgattgatgaataacaataaaatccttgcttatttatatggattgaaatgtgaaactgtcatattaattttttttaagttaacatctttgaatacgttaattaggtatttgattagccgttttagaaatttaatatagttgaaactccatgtgtgaaacacgtaacattaactaagaaatattgactacaaagagaaaataaaagtaaaatggcttcacataattaatcaatcatcggtttatatctccaaatttaaacaaataaatcgatttataatattttcttcgtgaaattatttgaatcaatctaaaggtttggtttgtaaaacttctatacaatgaggttctccatgacttgttaacactaaacttagaggagaagagtttctggatagcgggttaaacggttgggaagagcagttcggatctggcatgaaaacaatgaacataatccaatatatgtgccaaatatctacataaagttgggctttcaaaattgttaactcacgtgatcatgacacgtgtcaaatttattagtgaaatatccacccttatcaaatcaaattttgttatttttagggttttgtgcaaaataaaaccctctaactcatctatttttgcatctttattctccacctccaaaaaatgcataattatccgatgaagtctaaaataataccaatgtaaccccttttcgtcatttttctacgacaatattttgtaagatattgatatttaatatgtttaatcgaagccttctcgacgaaaagttcaaatcgaccttcgaaatattaaaaatctaatctatgggagtgtaaaaaagtttacaatatacgtataagggtcatattgcgtattattttagacttcataagattaatatgtgtttgttagagatatagggtaaaattgcaaaactagatgagtttgatgggtgttttgcacaaaaccctatatttttaaaaaacaaaatatagaaaaatttcataaccccatcggatatatacacaagtaaaaaaaatagttcatatatacaaattttttatttactatattaaaatattgaacaaattctattaaaaatcgtttatatattcaaaacagaagtaaaagttccctattttgttttagaaaaatattaatacgtgatttaatattttctaattttgtaacttaaatatgtctctctttttatttcttaatattatttcatttcatttttttctcaattacagagttctattcgtttaccacaaaattcagtgagaggctctgtctggtgcgtcttttatagatgttgtatgttttccttgtcttatctttcttttatactttgagaaatcccgtattatatataattagtaaaggcatggtatatggaatgtatataattgaaatattcttttgaaaaataccgattactatttagaatttttatatcatcacaacatttctcacaccagcatatttggacgagtcttatctaataaaattataaaccactctcagattttgtgttatgacatatttcaaagatttatggaaacaatttgaaggtctgtaacattgtaagactaaattcaattatggactcgatgtttcaaggtgttattcattagaattgaagaatgtataaacatggaacccaaatgcaacttctcaaatgttattactatatcttcttctttttttaattattattataacatgtaacgtaagctaaaattttaaaaaaataagttgaaaaagttatctattttaaaaataagataaaacactattttggtatgggaggagttgcaccggcaactcttgaacattgttcctttagcatcggaggaaaaaatggaatgaatggaattttcggtatgcaattatcggcgtccaaaaatgctttgcaacaagccggacctaaattaccgaactttccagtgaaaatggattgagaaatctctgcaatgcatccaggaatatccatcacggatgagaaacattttgttatatcaggtaatccaggaatcagttggaacggaaacagaaaaggaagttgagccggaaactgaggcaattgagcatttacagaaactatgatacatagaaccgctagaagtaaaaacacatttttgatagacataatgagaaattgagtaaaaagtcttagtatagcaactatatgcttaatgctttgtttgtttttgattgatgaataacaaaaatccttgcttatttatatggattgaaatgtgaaactgtcatattaattttttttaatttaacatctttgaatactttaattaggtatttgattagccgttttagaaatttaatatagttgaaactccatgtgtgaaacacgtaacattaactaagaaatattgactacaaagagaaaataaaagtaaaatggcttcacataattaatcaatcatcggtttatatctccaaatttaaacaaataaatcgatttataatattttcttcgtgaaattatttgaatcaatctaaaggtttggtttgtaaaacttctatacaatgaggttctccatgacttgttaacactaatcttagaggagaagagtttctggatagcgggttaaacggttgggaagagcagttcggatctggcatgaaaacaatgaacataatccaatatatgtgccaaatatctacataaagttgggctttcaaaattgttaactcacgtgatcatgacatgtgtcaaatttattagtgaaatatccacccttatcaaatcaaattttgttatttttagggttttgtgcaaaataaaaccctctaactcatctatttttgcatctttattctccacctccaaaaaatgcataattatccgatgaagtctaaaataatacgcaatttaaccccttttcgtcatttttctacgacaatattttgtaagatattgatatttaatatgtttaatcgaagctttctcgacgaaaagttcaaatcgaccttcgaaatattaaaaatctaatctatgggagtgtaaaaaagtttacaatatacgtataagggtcatattgcgtattattttagacttcataagattaatatgtgtttgttagagatatagggtaaaattgcaaaactagatgagttagatgggtgttttgcacaaaaccctatatttttaaaaaacaaaatatagaaaaatttcataaccccatcggatatatacacaagtaaaaaaaatagttcatatatacaaattttttatttactatattaaaatattgaacaaattctattaaaaatcgtttatatattcaaaacagaagtaaaagttccctattttgttttagaaaaatattaatacgtgatttaatattttctaattttgtaacttaaatatgtctctctttttatttcttaatattatttcattttatttttttctcaattacagagttctattcgtttaccacaaaattcaatgagaggctctgtctggtgcgtcttttatagatgttgtatgttttccttgtcttatctttcttttatactttgagaaatcccgtattatatataattagtaaaggcatggtatatggaatgtatataattgaaatattcttttgaaaaataccgattactatttagaatttttatatcatcacaacatttctcacaccagcatatttggacgagtcttatctaataaaattataaaccactctcagattttgtgttatgacatatttcaaagatttatggaaacaatttgaaggtctgtaacattgtaagactaaattcaattatggactcgatgtttcaaggtgttattcattagaagtgaagaatgtataaacatggaacccaaatgcaacttctcaaatgttattactatatcttcttctttttttaattattattataacatgtaacgtaagctaaaattttaaaaaaataagttgaaaaagttatctattttaaaaataagataaaacactattttggtatgggaggagttgcaccggcaactcttgaacattgttcctttagcatcggaggaaaaaatggaatgaatggaattttcggtatgcaattatcggcgtccaaaaatgctttgcaacaagccggacctaaattaccgaactttccagtgaaaatggattgagaaatctctgcaatgcatccaggaatatccatcacggatgagaaacattttgttatatcaggtaatccaggaataagttggaacggaaacagaaaaggaagttgagccggaaactgaggcaattgagcatttacagaaactatgatacatagaaccgctagaagtaaaaacacatttttgatagacataatgagaaattgagtaaaaagtcttagtatagcaactatatgtttaatgctttgtttgtttttgattgatgaataacaataaaatccttgcttatttatatggattgaaatgtgaaactgtcatattaattttttttaatttaacatctttgaatactttaattaggtatttgattagccgttttagaaatttaatatagttgaaactccatgtgtgaaacacgtaacattaactaagaaatattgactacaaagagaaaataaaagtaaaatggcttcacataattaatcaatcatcggtttatatctccaaatttaaacaaataaatcgatttataatattttcttcgtgaaattatttgaatcaatctaaaggtttggtttgtaaaacttctatacaatgaggttctccatgacttgttaacactaatcttagaggagaagagtttctggatagcgggttaaacggttgggaagagcagttcggatctggcatgaaaacaatgaacataatccaatatatgtgccaaatatctacataaagttgggctttcaaaattgttaactcacgtgatcatgacatgtgtcaaatttattagtgaaatatccacccttatcaaatcaaattttgttatttttagggttttgtgcaaaataaaaccctctaactcatctatttttgcatctttattctccacctccaaaaaatgcataattatccgatgaagtctaaaataatacgcaatttaaccccttttcgtcatttttctacgacaatattttgtaagatattgatatttaatatgtttaatcgaagctttctcgacgaaaagttcaaatcgaccttcgaaatattaaaaatctaatctatgggagtgtaaaaaagtttacaatatacgtataagggtcatattgcgtattattttagacttcataagattaatatgtgtttgttagagatatagggtaaaattgcaaaactagatgagttagatgggtgttttgcacaaaaccctatatttttaaaaaacaaaatatagaaaaatttcataaccccatcggatatatacacaagtaaaaaaaatagttcatatatacaaattttttatttactatattaaaatattgaacaaattctattaaaaatcgtttatatattcaaaacagaagtaaaagttccctattttgttttagaaaaatattaatacgtgatttaatattttctaattttgtaacttaaatatgtctctctttttatttcttaatattatttcattttatttttttctcaattacagagttctattcgtttaccacaaaattcaatgagaggctctgtctggtgcgtcttttatagatgttgtatgttttccttgtcttatctttcttttatactttgagaaatcccgtattatatataattagtaaaggcatggtatatggaatgtatataattgaaatattcttttgaaaaataccgattactatttagaatttttatatcatcacaacatttctcacaccagcatatttggacgagtcttatctaataaaattataaaccactctcagattttgtgttatgacatatttcaaagatttatggaaacaatttgaaggtctgtaacattgtaagactaaattcaattatggactcgatgtttcaaggtgttattcattagaattgaagaatgtataaacatggaacccaaatgcaacttctcaaatgttattactatatcttcttctttttttaattattattataacatgtaacgtaagctaaaattttaaaaaaataagttgaaaaagttatctattttaaaaataagataaaacactattttggtatgggaggagttgcaccggcaactcttgaacattgttcctttagcatcggaggaaaaaatggaatgaatggaattttcggtatgcaattatcggcgtccaaaaatgctttgcaacaagccggacctaaattaccgaactttccagtgaaaatggattgagaaatctctgcaatgcatccaggaatatccatcacggatgagaaacattttgttatatcaggtaatccaggaatcagttggaacggaaacagaaaaggaagttgagccggaaactgaggcaattgagcatttacagaaactatgatacatagaaccgctagaagtgaaaacacatttttgatagacataatgagaaattgagtaaaaagtcttagtatagcaacaatatgcttaatgctttgtttgtttttgattgatgaataacaataaaatccttgcttatttatatggattgaaatgtgaaactgtcatattaattttttttaagttaacatctttgaatactttaattaggtatttgattagccgttttagaaatttaatatagttgaaactccatgtgtgaaacacgtaacattaactaagaaatattgactacaaagagaaaataaaagtaaaatggcttcacataattaatcaatcatcggtttatatctccaaatttaaacaaataaatcgatttataatattttcttcgtgaaattatttgaatcaatctaaaggtttggtttgtaaaacttctatacaatgaggttctccatgacttgttaacactaaacttagaggagaagagtttctggatagcgggttaaacggttgggaagagcagttcggatctggcatgaaaacaatgaacataatccaatatatgtgccaaatatctacataaagttgggctttcaaaattgttaactcacgtgatcatgacatgtgtcaaatttattagtgaaatatccacccttatcaaatcaaattttgttatttttagggttttgtgcaaaataaaaccctctaactcatctatttttgcatctttattctccacctccaaaaaatgcataattatccgatgaagtctaaaataatacgcaatgtaaccccttttcgtcatttttctacgacaatattttgtaagatattgatatttaatatgtttaatcgaagccttctcgacgaaaagttcaaatcgaccttcgaaatattaaaaatctaatctatgggagtgtaaaaaagtttacaatatacgtataagggtcatattgcgtattattttagacttcataagattaatatgtgtttgttagagatatagggtaaaattgcaaaactagatgagtttgatgggtgttttgcacaaaaccctatatttttaaaaaacaaaatatagaaaaatttcataaccccatcggatatatacacaagtaaaaaaaatagttcatatatacaaattttttatttactatattaaaatattgaacaaattctattaaaaatcgtttatatattcaaaacagaagtaaaagttccctattttgttttagaaaaatattaatacgtgatttaatattttctaattttgtaacttaaatatgtctctctttttatttcttaatattatttcattttatttttttctcaattacaaagttctattcgttaaccacaaaattcaatgagaggctctgtctggtgcgtcttttatagatgttgtatgttttccttgtcttatctttcttttatactttgagaaatcccgtattatatataattagtaaaggcatggtatatggaatgtatataattgaaatattcttttgaaaaataccgattactatttagaatttttatatcatcacaacatttctcacaccagcatatttggacgagtcttatctaataaaattataaaccactctcagattttgtgttatgacatatttcaaagatttatggaaacaatttgaaggtctgtaacattgtaagactaaattcaattatggactcgatgtttcaaggtgttattcattagaattgaagaatgtataaacatggaacccaaatgcaacttctcaaatgttattactatatcttcttctttttttaattattattataacatgtaacgtaagctaaaattttaaaaaaataagttgaaaaagttatctattttaaaaataagataaaacactattttggtatgggaggagttgcaccggcaactcttgaacattgttcctttagcatcggaggaaaaaatggaatgaatggaattttcggtatgcaattatcggcgtccaaaaatgctttgcaacaagccggacctaaattaccgaactttccagtgaaaatggattgagaaatctctgcaatgcatccaggaatatccatcacggatgagaaacattttgttatatcaggtaatccaggaatcagttggaacggaaacagaaaaggaagttgagccggaaactgaggcaattgagcatttacagaaactatgatacatagaaccgctagaagtaaaaacacatttttgatagacataatgagaaattgagtaaaaagtcttagtatagcaactatatgcttaatgctttgtttgtttttgattgatgaataacaaaaatccttgcttatttatatggattgaaatgtgaaactgtcatattaattttttttaatttaacatctttgaatactttaattaggtatttgattagccgttttagaaatttaatatagttgaaactccatgtgtgaaacacgtaacattaactaagaaatattgactacaaagagaaaataaaagtaaaatggcttcacataattaatcaatcatcggtttatatctccaaatttaaacaaataaatcgatttataatattttcttcgtgaaattatttgaatcaatctaaaggtttggtttgtaaaacttctatacaatgaggttctccatgacttgttaacactaatcttagaggagaagagtttctggatagcgggttaaacggttgggaagagcagttcggatctggcatgaaaacaatgaacataatccaatatatgtgccaaatatctacataaagttgggctttcaaaattgttaactcacgtgatcatgacatgtgtcaaatttattagtgaaatatccacccttatcaaatcaaattttgttatttttagggttttgtgcaaaataaaaccctctaactcatctatttttgcatctttattctccacctccaaaaaatgcataattatccgatgaagtctaaaataatacgcaatgtaaccccttttcgtcatttttctacgacaatattttgtaagatattgatatttaatatgtttaatcgaagccttctcgacgaaaagttcaaatcgaccttcgaaatattaaaaatctaatctatgggagtgtaaaaaagtttacaatatacgtataagggtcatattgcgtattattttagacttcataagattaatatgtgtttgttagagatatagggtaaaattgcaaaactagatgagttagatgggtgttttgcacaaaaccctatattttttaaaaacaaaatatagaaaaatttcataaccccatcggatatatacacaagtaaaaaaaatagttcatatatacaaattttttatttactatattaaaatattgaacaaattctattaaaaatcgtttatatattcaaaacagaagtaaaagttccctattttgttttagaaaaatattaatacgtgatttaatattttctaattttgtaacttaaatatgtctctctttttatttcttaatattatttcatttcatttttttctcaattacagagttctattcgtttaccacaaaattcagtgagaggctctgtctggtgcgtcttttatagatgttgtatgttttccttgtcttatctttcttttatactttgagaaatcccgtattatatataattagtaaaggcatggtatatagaatgtatataattgaaatattcttttgaaaaatactgattactatttagaatttttatatcatcacaacatttctcacaccagcatatttagacgagtcttatctaataaaattataaaccactctcagattttgtgttatgacatatttcaaagatttatggaaacaatttgaaggtctgtaacattgtaagactaaattcaattatggactcgatgtttcaaggtgttattcattagaagtgaagaatgtataaacatggaacccaaatgcaacttctcaaatgttattactatatcttcttctttttttaattattattataacatgtaacgtaagctaaaattttaaaaaaataagttgaaaaagttatctattttaaaaataagataaaacactattttggtatgggaggagttgcaccggcaactcttgaacattgttcctttagcatcggaggaaaaaatggaatgaatggaattttcggtatgcaattatcggcgtccaaaaatgctttgcaacaagccggacctaaattaccgaactttccagtgaaaatggattgagaaatctctgcaatgcatccaggaatatccatcacggatgagaaacattttgttatatcaggtaatccaggaatcagttggaacggaaacagaaaaggaagttgagccggaaactgaggcaattgagcatttacagaaactatgatacatagaaccgctagaagtaaaaacacatttttgatagacataatgagaaattgagtaaaaagtcttagtatagcaacaatatgcttaatgctttgtttgtttttgattgatgaataacaataaaatccttgcttatttatatggattgaaatgtgaaactgtcatattaatttttttaatttaacatctttgaatactttaattaggtatttgattagccgttttagaaatttaataaagttgaaactccatgtgtgaaacacgtaacattaactaagaaatattgactacaaagagaaaataaaagtaaaatggcttcacataattaatcaatcatcggtttatatctccaaatttaaacaaataaatcgatttataatattttcttcgtgaaattatttgaatcaatctaaaggtttggtttgtaaaacttctatacaatgaggttctccatgacttgttaacactaaacttagaggagaagagtttctggatagcgggttaaacggttgggaagagcagttcggatctggcatgaaaacaatgaacataatccaatatatgtgccaaatatctacataaagttgggttttcaaaattgttaactcacgtgatcgtgacacgtgtcaaatttattagtgaaatatccacccttatcaaatcaaattttgttatttttagggttttgtgcaaaataaaaccctctaactcatctatttttgcatctttattctccacctccaaaaaatgcataattatccgatgaagtctaaaataatacgcaatgtaaccccttttcgtcatttttctacgacaatattttgtaagatattgatatttaatatgtttaatcgaagccttctcgacgaaaagttcaaatcgaccttcgaaatattaaaaatctaatctatgggagtgtaaaaaagtttacaatatacgtataagggtcatattgcgtattattttagacttcataagattaatatgtgtttgttagagatatagggtaaaattgcaaaactagatgagttagatgggtgttttgcacaaaaccctatatttttaaaaaacaaaatatagaaaaatttcataaccccatcggatatatacacaagtaaaaaaaatagttcatatatacaaattttttatttactatattaaaatattgaacaaattctattaaaaatcgtttatatattcaaaacagaagtaaaagttccctattttgttttagaaaaatattaatacgtgatttaatattttctaattttgtaacttaaatatgtctctctttttatttcttaatattatttcatttcatttttttctcaattacagagttctattcgtttaccacaaaattcagtgagaggctctgtttggtgcgtcttttatagatgttgtatgttttccttgtcttatctttctttatactttgagaaatcccgtattatatataattagtaaaggcatggtatatggaatgtatataattgaaatattcttttgaaaaataccgattactatttagaatttttatatcatcacaacatttctcacaccagcatatttggacgagtcttatctaataaaattataaaccactctcagattttgtgttatgacatatttcaaagatttatggaaacaatttgaaggtctgtaacattgtaagactaaattcaattatggactcgatgtttcaaggtgttattcattagaagtgaagaatgtataaacatggaacccaaatgcaacttctcaaatgttattactatatcttcttctttttttaattattattataacatgtaacgtaagctaaaattttaaaaaaataagttgaaaaagttatctattttaaaaataagataaaacactattttggtatgggaggagttgcaccggcaactcttgaacattgttcctttagcatcggaggaaaaaatggaatgaatggaattttcggtatgcaattatcggcgtccaaaaatgctttgcaacaagccggacctaaattaccgaactttccagtgaaaatggattgagaaatctctgcaatgcatccaggaatatccatcacggatgagaaacattttgttatatcaggtaatccaggaatcagttggaacggaaacagaaaaggaagttgagccggaaactgaggcaattgagcatttacagaaactatgatacatagaaccgctagaagtaaaaacacatttttgatagacataatgagaaattgagtaaaaagtcttagtatagcaacaatatgcttaatgctttgtttgtttttgattgatgaataacaataaaatccttgcttatttatatggattgaaatgtgaaactgtcatattaatttttttaatttaacatctttgaatactttaattaggtatttgattagccgttttagaaatttaataaagttgaaactccatgtgtgaaacacgtaacattaactaagaaatattgactacaaagagaaaataaaagtaaaatggcttcacataattaatcaatcatcggtttatatctccaaatttaaacaaataaatcgatttataatattttcttcgtgaaattatttgaatcaatctaaaggtttggtttgtaaaacttctatacaatgaggttctccatgacttgttaacactaaacttagaggagaagagtttctggatagcgggttaaacggttgggaagagcagttcggatctggcatgaaaacaatgaacataatccaatatatgtgccaaatatctacataaagttgggttttcaaaattgttaactcacgtgatcgtgacacgtgtcaaatttattagtgaaatatccacccttatcaaatcaaattttgttatttttagggttttgtgcaaaataaaaccctctaactcatctatttttgcatctttattctccacctccaaaaaatgcataattatccgatgaagtctaaaataatacgcaatgtaaccccttttcgtcatttttctacgacaatattttgtaagatattgatatttaatatgtttaatcgaagccttctcgacgaaaagttcaaatcgaccttcgaaatattaaaaatctaatctatgggagtgtaaaaaagtttacaatatacgtataagggtcatattgcgtattattttagacttcataagattaatatgtgtttgttagagatatagggtaaaattgcaaaactagatgagttagatgggtgttttgcacaaaaccctatatttttaaaaaacaaaatatagaaaaatttcataaccccatcggatatatacacaagtaaaaaaaatagttcatatatacaaattttttatttactatattaaaatattgaacaaattctattaaaaatcgtttatatattcaaaacagaagtaaaagttccctattttgttttagaaaaatattaatacgtgatttaatattttctaattttgtaacttaaatatgtctctctttttatttcttaatattatttcatttcatttttttctcaattacagagttctattcgtttaccacaaaattcagtgagaggctctgtttggtgcgtcttttatagatgttgtatgttttccttgtcttatctttctttatactttgagaaatcccgtattatatataattagtaaaggcatggtatatggaatgtatataattgaaatattcttttgaaaaataccgattactatttagaatttttatatcatcacaacatttctcacaccagcatatttggacgagtcttatctaataaaattataaaccactctcagattttgtgttatgacatatttcaaagatttatggaaacaatttgaaggtctgtaacattgtaagactaaattcaattatggactcgatgtttcaaggtgttattcattagaagtgaagaatgtataaacatggaacccaaatgcaacttctcaaatgttattactatatcttcttctttttttaattattattataacatgtaacgtaagctaaaattttaaaaaaataagttgaaaaagttatctattttaaaaataagataaaacactattttggtatgggaggagttgcaccggcaactcttgaacattgttcctttagcatcggaggaaaaaatggaatgaatggaattttcggtatgcaattatcggcgtccaaaaatgctttgcaacaagccggacctaaattaccgaactttccagtgaaaatggattgagaaatctctgcaatgcatccaggaatatccatcacggatgagaaacattttgttatatcaggtaatccaggaatcagttggaacggaaacagaaaaggaagttgagccggaaactgaggcaattgagcatttacagaaactatgatacatagaaccgctagaagtaaaaacacatttttgatagacataatgagaaattgagtaaaaagtcttagtatagcaacaatatgcttaatgctttgtttgtttttgattgatgaataacaataaaatccttgcttatttatatggattgaaatgtgaaactgtcatattaatttttttaatttaacatctttgaatactttaattaggtatttgattagccgttttagaaatttaataaagttgaaactccatgtgtgaaacacgtaacattaactaagaaatattgactacaaagagaaaataaaagtaaaatggcttcacataattaatcaatcatcggtttatatctccaaatttaaacaaataaatcgatttataatattttcttcgtgaaattatttgaatcaatctaaaggtttggtttgtaaaacttctatacaatgaggttctccatgacttgttaacactaaacttagaggagaagagtttctggatagcgggttaaacggttgggaagagcagttcggatctggcatgaaaacaatgaacataatccaatatatgtgccaaatatctacataaagttgggttttcaaaattgttaactcacgtgatcgtgacacgtgtcaaatttattagtgaaatatccacccttatcaaatcaaattttgttatttttagggttttgtgcaaaataaaaccctctaactcatctatttttgcatctttattctccacctccaaaaaatgcataattatccgatgaagtctaaaataatacgcaatgtaaccccttttcgtcatttttctacgacaatattttgtaagatattgatatttaatatgtttaatcgaagccttctcgacgaaaagttcaaatcgaccttcgaaatattaaaaatctaatctatgggagtgtaaaaaagtttacaatatacgtataagggtcatattgcgtattattttagacttcataagattaatatgtgtttgttagagatatagggtaaaattgcaaaactagatgagttagatgggtgttttgcacaaaaccctatatttttaaaaaacaaaatatagaaaaatttcataaccccatcggatatatacacaagtaaaaaaaatagttcatatatacaaattttttatttactatattaaaatattgaacaaattctattaaaaatcgtttatatattcaaaacagaagtaaaagttccctattttgttttagaaaaatattaatacgtgatttaatattttctaattttgtaacttaaatatgtctctctttttatttcttaatattatttcatttcatttttttctcaattacagagttctattcgtttaccacaaaattcagtgagaggctctgtttggtgcgtcttttatagatgttgtatgttttccttgtcttatctttctttatactttgagaaatcccgtattatatataattagtaaaggcatggtatatggaatgtatataattgaaatattcttttgaaaaataccgattactatttagaatttttatatcatcacaacatttctcacaccagcatatttggacgagtcttatctaataaaattataaaccactctcagattttgtgttatgacatatttcaaagatttatggaaacaatttgaaggtctgtaacattgtaagactaaattcaattatggactcgatgtttcaaggtgttattcattagaagtgaagaatgtataaacatggaacccaaatgcaacttctcaaatgttattactatatcttcttctttttttaattattattataacatgtaacgtaagctaaaattttaaaaaaataagttgaaaaagttatctattttaaaaataagataaaacactattttggtatgggaggagttgcaccggcaactcttgaacattgttcctttagcatcggaggaaaaaatggaatgaatggaattttcggtatgcaattatcggcgtccaaaaatgctttgcaacaagccggacctaaattaccgaactttccagtgaaaatggattgagaaatctctgcaatgcatccaggaatatccatcacggatgagaaacattttgttatatcaggtaatccaggaatcagttggaacggaaacagaaaaggaagttgagccggaaactgaggcaattgagcatttacagaaactatgatacatagaaccgctagaagtaaaaacacatttttgatagacataatgagaaattgagtaaaaagtcttagtatagcaacaatatgcttaatgctttgtttgtttttgattgatgaataacaataaaatccttgcttatttatatggattgaaatgtgaaactgtcatattaatttttttaatttaacatctttgaatactttaattaggtatttgattagccgttttagaaatttaataaagttgaaactccatgtgtgaaacacgtaacattaactaagaaatattgactacaaagagaaaataaaagtaaaatggcttcacataattaatcaatcatcggtttatatctccaaatttaaacaaataaatcgatttataatattttcttcgtgaaattatttgaatcaatctaaaggtttggtttgtaaaacttctatacaatgaggttctccatgacttgttaacactaaacttagaggagaagagtttctggatagcgggttaaacggttgggaagagcagttcggatctggcatgaaaacaatgaacataatccaatatatgtgccaaatatctacataaagttgggttttcaaaattgttaactcacgtgatcgtgacacgtgtcaaatttattagtgaaatatccacccttatcaaatcaaattttgttatttttagggttttgtgcaaaataaaaccctctaactcatctatttttgcatctttattctccacctccaaaaaatgcataattatccgatgaagtctaaaataatacgcaatgtaaccccttttcgtcatttttctacgacaatattttgtaagatattgatatttaatatgtttaatcgaagccttctcgacgaaaagttcaaatcgaccttcgaaatattaaaaatctaatctatgggagtgtaaaaaagtttacaatatacgtataagggtcatattgcgtattattttagacttcataagattaatatgtgtttgttagagatatagggtaaaattgcaaaactagatgagttagatgggtgttttgcacaaaaccctatatttttaaaaaacaaaatatagaaaaatttcataaccccatcggatatatacacaagtaaaaaaaatagttcatatatacaaattttttatttactatattaaaatattgaacaaattctattaaaaatcgtttatatattcaaaacagaagtaaaagttccctattttgttttagaaaaatattaatacgtgatttaatattttctaattttgtaacttaaatatgtctctctttttatttcttaatattatttcatttcatttttttctcaattacagagttctattcgtttaccacaaaattcagtgagaggctctgtttggtgcgtcttttatagatgttgtatgttttccttgtcttatctttctttatactttgagaaatcccgtattatatataattagtaaaggcatggtatatggaatgtatataattgaaatattcttttgaaaaataccgattactatttagaatttttatatcatcacaacatttctcacaccagcatatttggacgagtcttatctaataaaattataaaccactctcagattttgtgttatgacatatttcaaagatttatggaaacaatttgaaggtctgtaacattgtaagactaaattcaattatggactcgatgtttcaaggtgttattcattagaagtgaagaatgtataaacatggaacccaaatgcaacttctcaaatgttattactatatcttcttctttttttaattattattataacatgtaacgtaagctaaaattttaaaaaaataagttgaaaaagttatctattttaaaaataagataaaacactattttggtatgggaggagttgcaccggcaactcttgaacattgttcctttagcatcggaggaaaaaatggaatgaatggaattttcggtatgcaattatcggcgtccaaaaatgctttgcaacaagccggacctaaattaccgaactttccagtgaaaatggattgagaaatctctgcaatgcatccaggaatatccatcacggatgagaaacattttgttatatcaggtaatccaggaatcagttggaacggaaacagaaaaggaagttgagccggaaactgaggcaattgagcatttacagaaactatgatacatagaaccgctagaagtaaaaacacatttttgatagacataatgagaaattgagtaaaaagtcttagtatagcaacaatatgcttaatgctttgtttgtttttgattgatgaataacaataaaatccttgcttatttatatggattgaaatgtgaaactgtcatattaatttttttaatttaacatctttgaatactttaattaggtatttgattagccgttttagaaatttaataaagttgaaactccatgtgtgaaacacgtaacattaactaagaaatattgactacaaagagaaaataaaagtaaaatggcttcacataattaatcaatcatcggtttatatctccaaatttaaacaaataaatcgatttataatattttcttcgtgaaattatttgaatcaatctaaaggtttggtttgtaaaacttctatacaatgaggttctccatgacttgttaacactaaacttagaggagaagagtttctggatagcgggttaaacggttgggaagagcagttcggatctggcatgaaaacaatgaacataatccaatatatgtgccaaatatctacataaagttgggctttcaaaattgttaactcacgtgatcatgacacgtgtcaaatttattagtgaaatatccacccttatcaaatcaaattttgttatttttagggttttgtgcaaaataaaaccctctaactcatctatttttgcatctttattctccacctccaaaaaatgaataattatccgatgaagtctaaaataatacgcaatgtaaccccttttcgtcatttttctacgacaatattttgtaagatattgatatttaatatgtttaatcgaagccttctcgacgaaaagttcaaatcgaccttcgaaatattaaaaatctaatctatgggagtgtaaaaaagtttacaatatacgtataagggtcatattgcgtattattttagacttcataagattaatatgtgtttgttagagatatagggtaaaattgcaaaactagatgagttagatgggtgttttgcacaaaaccctatatttttaaaaaacaaaatatagaaaaatttcataaccccatcggatatatacacaagtaaaaaaaatagttcatatatacaaattttttatttactatattaaaatattgaacaaattctattaaaaatcgtttatatattcaaaacagaagtaaaagttccctattttgttttagaaaaatattaatacgtgatttaatattttctaattttgtaacttaaatatgtctctctttttatttcttaatattatttcatttcatttttttctcaattacagagttctattcgtttaccacaaaattcagtgagaggctctgtttggtgcgtctttttatagatgttgtatgttttccttgtcttatctttctttatactttgagaaatcccgtattatatataattagtaaaggcatggtatatggaatgtatataattgaaatattcttttgaaaaataccgattactatttagaatttttatatcatcacaacatttctcacaccagcatatttggacgagtcttatctaataaaattataaaccactctcagattttgtgttatgacatatttcaaagatttatggaaacaatttgaaggtctgtaacattgtaagactaaattcaattatggactcgatgtttcaaggtgttattcattagaagtgaagaatgtataaacatggaacccaaatgcaacttctcaaatgttattactatatcttcttctttttttaattattattataacatgtaacgtaagctaaaattttaaaaaaataagttgaaaaagttatctattttaaaaataagataaaacactattttggtatgggaggagttgcaccggcaactcttgaacattgttcctttagcatcggaggaaaaaatggaatgaatggaattttcggtatgcaattatcggcgtccaaaaatgctttgcaacaagccggacctaaattaccgaactttccagtgaaaatggattgagaaatctctgcaatgcatccaggaatatccatcacggatgagaaacattttgttatatcaggtaatccaggaatcagttggaacggaaacagaaaaggaagttgagccggaaactgaggcaattgagcatttacagaaactatgatacatagaaccgctagaagtaaaaacacatttttgatagacataatgagaaattgagtaaaaagtcttagtatagcaacaatatgcttaatgctttgtttgtttttgattgatgaataacaataaaatccttgcttatttatatggattgaaatgtgaaactgtcatattaattttttttaatttaacatctttgaatactttaattaggtatttgattagccgttttagaaatttaatatagttgaaactccatgtgtgaaacacgtaacattaactaagaaatattgactacaaagagaaaataaaagtaaaatggcttcacataattaatcaatcatcggtttatatctccaaatttaaacaaataaatcgatttataatattttcttcgtgaaattatttgaatcaatctaaaggtttggtttgtaaaacttctatacaatgaggttctccatgacttgttaacactaatcttagaggagaagagtttctggatagcgggttaaacggttgggaagagcagttcggatctggcatgaaaacaatgaacataatccaatatatgtgccaaatatctacataaagtttggatttcaaaattgttaactcacgtgatcatgacacgtgtcaaatgttttagtgaaatatccacccttatcaaatcaaattttgttatttttagggttttgtgcaaaataaaaccctctaactcatctatttttgcatctttattctccacctccaaaaaatgcataattatccgatgaagtctaaaataatacgcaatgtaaccccttttcgtcatttttctacgacaatattttgtaagatattgatatttaatatgtttaatcgaagccttctcgacgaaaagttcaaatcgaccttcgaaatattaaaaatctaatttatgagagtgtaaaaaagtttacaatatacgtataagggtcatattgcgtattattttagacttcataagattaatatgtgtttgttagagatatagggtaaaattgcaaaactagatgagttagatgggtgttttgcacaaaaccctatatttttaaaaaacaaaatatagaaaaatttcataaccccatcggatatatacacaagtaaaaaaaatagttcatatatacagattttttatttactatattaaaatattgaacaaattctattaaaaatcgtttatatattcaaaacagaagtaaaagttccctattttgttttagaaaaatattaatacgtgatttaatattttctaattttgtaacttaaatatgtctctctttttatttcttaatattatttcattttatttttttctctattacagagttctattcgtttaccacaaaattcaatgagaagctctgtctggtgcgtcttttatagatgttgtatgttttccttgtcttatctttcttttatactttgagaaatcccgtattatatataattagtaaaggcatggtatatggaatgtatataattgaaatattcttttgaaaaataccgattactatttagaatttttatatcatcacaacatttctcacaccagcatatttggacgagtcttatctaataaaattataaaccactctcagattttgtgttatgacatatttcaaagatttatggaaacaatttgaaggtctgtaacattgtaagactaaattcaattatggactcgatgtttcaaggtgttattcattagaagtgaagaatgtataaacatggaacccaaatgcaacttctcaaatgttattactatatcttcttctttttttaattattattataacatgtaacgtaagctaaaattttaaaaaaataagttgaaaaagttatctattttaaaaataagataaaacactattttggtatgggaggagttgcaccggcaactcttgaacattgttcctttagcatcggaggaaaaaatggaatgaatggaattttcggtatgcaattatcggcgtccaaaaatgctttgcaacaagccggacctaaattaccgaactttccagtgaaaatggattgagaaatctctgcaatgcatccaggaatatccatcacggatgagaaacattttgttatatcaggtaatccaggaatcagttggaacggaaacagaaaaggaagttgagccggaaactgaggcaattgagcatttacagaaactatgatacatagaaccgctagaagtaaaaacacatttttgatagacataatgagaaattgagtaaaaagtcttagtatagcaactatatgcttaatgctttgtttgtttttgattgatgaataacaataaaatccttgcttatttatatggattgaaatgtgaaactgtcatattaatttttttaatttaacatctttgaatactttaattaggtatttgattagccgttttagaaatttaatatagttgaaactccatgtgtgaaacacgtaacattaactaagaaatattgactacaaagagaaaataaaagtaaaatggcttcacataattaatcaatcatcggtttatatctccaaatttaaacaaataaatcgatttataatattttcttcgtgaaattatttgaatcaatctaaaggtttagtttgtaaaacttctatacaatgaggttctccatgacttgttaacactaatcttagaggagaagagtttctggatagcgggttaaacggttgggaagagcagttcggatctggcatgaaaacaatgaacataatccaatatatgtgccaaatatctacataaagttgggctttcaaaattgttaactcacgtgatcatgacacgtgtcaaatttattagtgaaatatctacccttatcaaatcaaattttgttatttttagggttttgtgcaaaataaaaccctctaactcatctatttttgcatctttattctccacctccaaaaaatgaataattatccgatgaagtctaaaataatacgcaatgtaaccccttttcgtcatttttctacgacaatattttgtaagatattgatatttaatatgtttaatcgaagccttctcgacgaaaagttcaaatcgaccttcgaaatattaaaaatctaatctatgggagtgtaaaaaagtttacaatatacgtataagggtcatattgcgtattattttagacttcataagattaatatgtgtttgttagagatatagggtaaaattgcaaaactagatgagttagatgggtgttttgcacaaaaccctatatttttaaaaaacaaaatatagaaaaatttcataaccccatcggatatatacacaagtaaaaaaaatagttcatatatacaaattttttatttactatattaaaatattgaacaaattctattaaaaatcgtttatatattcaaaacagaagtaaaagttccctattttgttttagaaaaatattaatacgtgatttaatattttctaattttgtaacttaaatatgtctctctttttatttcttaatattatttcattttatttttttctcaattacagagttctattcgtttaccacaaaattcaatgagaggctctgtctggtgcgtcttttatagatgttgtatgttttccttgtcttatctttcttttatactttgagaaatcccgtattatatataattagtaaaggcatggtatatggaatgtatataattgaaatattcttttgaaaaataccgattactatttagaatttttatatcatcacaacatttctcacaccagcatatttggacgagtcttatctaataaaattataaaccactctcagattttgtgttatgacatatttcaaagatttatggaaacaatttgaaggtctgtaacattgtaagactaaattcaattatggactcgatgtttcaaggtgttattcattagaagtgaagaatgtataaacatggaacccaaatgcaacttctcaaatgttattactatatcttcttctttttttaattattattataacatgtaacgtaagctaaaattttaaacaaataagttgaaaaagttatctattttaaaaataagataaaacactattttggtatgggaggagttgcaccggcaactcttgaacattgttcctttagcatcggaggaaaaaatggaatgaatggaattttcggtatgcaattatcggcgtccaaaaatgctttgcaacaagccggacctaaattaccgaactttccagtgaaaatggattgagaaatctctgcaatgcatccaggaatatccatcacggatgagaaacattttgttatatcaggtaatccaggaatcagttggaacggaaacaaaaaaggaagttgagccggaaactgaggcaattgagcatttacagaaactatgatacatagaaccgctagaagtaaaaacacatttttgatagacataatgagaaattgagtaaaaagtcttagtatagcaactatatgcttaatgctttgtttgtttttgattgatgaataacaataaaatccttgcttatttatatggattgaaatgtgaaactgtcatattaattttttttaatttaacatctttgaatactttaattaggtatttgattagccgttttagaaatttaatatagttgaaactccatgtgtgaaacacgtaacattaactaagaaatattgactacaaagagaaaataaaagtaaaatggcttcacataattaatcaatcatcggtttatatctccaaatttaaacaaataaatcgatttataatattttcttcgtgaaattatttgaatcaatctaaaggtttagtttgtaaaacttctatacaatgaggttctccatgacttgttaacactaatcttagaggagaagagtttctggatagcgggttaaacggttgggaagagcagttcggatctggcatgaaaacaatgaacataatccaatatatgtgccaaatatctacataaagttgggctttcaaaattgttaactcacgtgatcatgacacgtgtcaaattttttagtgaaatatccacccttatcaaatcaaattttgttatttttagggttttgtgcaaaataaaaccctctaactcatctatttttgcatctttattctccacctccaaaaaatgcataattatccgatgaagtctaaaataatacgcaatgtaaccccttttcgtcatttttctacgacaatattttgtaagatattgatatttaatatgtttaatcgaagccttctcgacgaaaagttcaaatcgaccttcgaaatattaaaaatctaatttatgagagtgtaaaaaagtttacaatatacgtataagggtcatattgcgtattattttagacttcataagattaatatgtgtttgttagagatatagggtaaaattgcaaaactagatgagttagatgggtgttttgcacaaaaccctatatttttaaaaaacaaaatatagaaaaatttcataaccccatcggatatatacacaagtaaaaaaaatagttcatatatacagattttttatttactatattaaaatattgaacaaattctattaaaaatcgtttatatattcaaaacagaagtaaaagttccctattttgttttagaaaaatattaatacgtgatttaatattttctaattttgtaacttaaatatgtctctctttttatttcttaatattatttcattttatttttttctctattacagagttctattcgtttaccacaaaattcaatgagaagctctgtctggtgcgtcttttatagatgttgtatgttttccttgtcttatctttcttttatactttgagaaatcccgtattatatataattagtaaaggcatggtatatggaatgtatataattgaaatattcttttgaaaaataccgattactctttagaatttttatatcatcacaacatttctcacaccagcatatttggacgagtcttatctaataaaattataaaccactctcagattttgtgttatgacatatttcaaagatttatggaaacaatttgaaggtctgtaacattgtaagactaaattcaattatggactcgatgtttcaaggtgttattcattagaagtgaagaatgtataaacatggaacccaaatgcaacttctcaaatgttattactatatcttcttctttttttaattattattataacatgtaacgtaagctaaaattttaaaaaaataagttgaaaaagttatctattttaaaaataagataaaacactattttggtatgggaggagttgcaccggcaactcttgaacattgttcctttagcatcggaggaaaaaatggaatgaatggaattttcggtatgcaattatcggcgtccaaaaatgctttgcaacaagccggacctaaattaccgaactttccagtgaaaatggattgagaaatctctgcaatgcatccaggaatatccatcacggatgagaaacattttgttatatcaggtaatccaggaatcagttggaacggaaacagaaaaggaagttgagccggaaactgaggcaattgagcatttacagaaactatgatacatagaaccgctagaagtaaaaacacatttttgatagacataatgagaaattgagtaaaaagtcttagtatagcaactatatgcttaatgctttgtttgtttttgattgatgaataacaataaaatccttgcttatttatatggattgaaatgtgaaactgtcatattaattttttttaatttaacatctttgaatactttaattaggtatttgattagccgttttagaaatttaatatagttgaaactccatgtgtgaaacacgtaacattaactaagaaatattgactacaaagagaaaataaaagtaaaatggcttcacataattaatcaatcatcggtttatatctccaaatttaaacaaataaatcgatttataatattttcttcgtgaaattatttgaatcaatctaaaggtttggtttgtaaaacttctatacaatgaggttctccatgacttgttaacactaatcttagaggagaagagtttctggatagcgggttaaacggttgggaagagcagttcggatctggcatgaaaacaatgaacataatccaatatatgtgccaaatatctacataaagtttggatttcaaaattgttaactcacgtgatcatgacacgtgtcaaatgttttagtgaaatatccacccttatcaaatcaaattttgttatttttagggttttgtgcaaaataaaaccctctaactcatctatttttgcatctttattctccacctccaaaaaatgcataattatccgatgaagtctaaaataatacgcaatgtaaccccttttcgtcatttttctacgacaatattttgtaagatattgatatttaatatgtttaatcgaagccttctcgacgaaaagttcaaatcgaccttcgaaatattaaaaatctaatttatgagagtgtaaaaaagtttacaatatacgtataagggtcatattgcgtattattttagacttcataagattaatatgtgtttgttagagatatagggtaaaattgcaaaactagatgagttagatgggtgttttgcacaaaaccctatatttttaaaaaacaaaatatagaaaaatttcataaccccatcggatatatacacaagtaaaaaaaatagttcatatatacagattttttatttactatattaaaatattgaacaaattctattaaaaatcgtttacatattcaaaacagaagtaaaagttccctattttgttttagaaaaatattaatacgtgatttaatattttctaattttgtaacttaaatatgtctctctttttatttcttaatattatttcattttatttttttctctattacagagttctattcgtgtaccacaaaattcaatgagaagctctgtctggtgcgtcttttatagatgttgtatgttttccttgtcttatctttcttttatactttgagaaatcccgtattatatataattagtaaaggcatggtatatggaatgtatataattgaaatattcttttgaaaaataccgattactctttagaatttttatatcatcacaacatttctcacaccagcatatttggacgagtcttatctaataaaattataaaccactctcagattttgtgttatgacatatttcaaagatttatggaaacaatttgaaggtctgtaacattgtaagactaaattcaattatggactcgatgtttcaaggtgttattcattagaagtgaagaatgtataaacatggaacccagatgcaacttctcaaatgttattactatatcttcttctttttttaattattattataacatgtaacgtaagctaaaattttaaaaaaataagttgaaaaagttatctattttaaaaataagataaaacactattttggtatgggaggagttgcaccggcaactcttgaacattgttcctttagcatcggaggaaaaaatggaatgaattgaattttcggtatgcaattatcggcgtccaaaaatgctttgcaacaagccggacctaaattaccgaactttccagtgaaaatggattgagaaatctctgcaatgcatccaggaatatccatcacggatgagaaacattttgttatatcaggtaatccaggaatcagttggaacggaaacagaaaaggaagttgagccggaaactgaggcaattgagcatttacagaaactatgatacatagaaccgctagaagtaaaaacacatttttgatagacataatgagaaattgagtaaaaagtctgagtatagcaactatatgcttaatgctttgtttgtttttgattgatgaataacaataaaatccttgcttatttatatggattgaaatgtgaaactgtcatattaattttttttaatttaacatctttgaatactttaattaggtatttgattagccgttttagaaatttaatatagttgaaactccatgtgtgaaacacgtaacattaactaagaaatattgactacaaagagaaaataaaagtaaaatagcttcacataattaatcaatcatcggtttatatctccaaatttaaacaaataaatcgatttataatattttcttcgtgaaattatttgaatcaatctaaaggtttggtttgtaaaacttctatacaatgaggttctccatgacttgttaacactaatcttagaggagaagagtttctggatagcgggttaaacggttgggaagagcagttcggatctggcatgaaaacaatgaacataatccaatatatgtgccaaatatctacataaagtttggatttcaaaattgttaactcacgtgatcatgacacgtgtcaaatttattagtgaaatatccacccttatcaaatcaaattttgttatttttagggttttgtgcaaaataaaaccctctaactcatctatttttgcatctttattctccacctccaaaaaatgcataattatccgatgaagtctaaaataatacgcaatgtaaccccttttcgtcatttttctacgacaatattttgtaagatattgatatttaatatgtttaatcgaagccttctcgacgaaaagttcaaatcgaccttcgaaatattaaaaatctaatctatgggagtgtaaaaaagtttacaatatacgtataagggtcatattgcgtattattttagacttcataagattaatatgtgtttgttagagatatagggtaaaattgcaaaactagatgagttagatgggtgttttgcgcaaaaccctatatttttaaaaaacaaaatatagaaaaatttcataaccccatcggatatatacacaagtaaaaaaaatagttcatatatacaaattttttatttactatattaaaatattgaacaaattctattaaaaatcgtttatatattcaaaacagaagtaaaagttccctattttgttttagaaaaatattaatacgtgatttaatattttctaattttgtaacttaaatatgtctctctttttatttcttaatattatttcattttatttttttctcaattacagagttctattcgtttaccacaaaattcaatgagaggctctgtctggtgcgtcttttatagatgttgtatgttttccttgtcttatctttcttttatactttgagaaatcccgtattatatataattagtaaaggcatggtatatggaatgtatataattgaaatattcttttgaaaaataccgattactctttagaatttttatatcatcacaacatttctcacaccagcatatttggacgagtcttatctaataaaattataaaccactctcagattttgtgttatgacatatttcaaagatttatggaaacaatttgaaggtctgtaacattgtaagactaaattcaattatggactcgatgtttcaaggtgttattcattagaagtgaagaatgtataaacatggaacccaaatgcaacttctcaaatgttattactatatcttcttctttttttaattattattataacctgtaacgtaagctaaaattttaaaaaaataagttgaaaaagttatctattttaaaaataagataaaacactattttggtatgggaggagttgcaccggcaactcttgaacatttttcctttagcatcggaggaaaaaatggaatgaatggaattttcggtatgcaattatcggcgtccaaaaatgctttgcaacaagccggacctaaattaccgaactttccagtgaaaatggattgagaaatctctgcaatgcatccaggaatatccatcacggatgagaaacattttgttatatcaggtaatccaggaatcagttggaacggaaacagaaaaggaagttgagccggaaactgaggcaattgagcatttacagaaactatgatacatagaaccgctagaagtaaaaacacatttttgatagacataatgagaaattgagtaaaaagtctgagtatagcaactatatgcttaatgctttgtttgtttttgattgatgaataacaataaaatccttgcttatttatatggattgaaatgtgaaactgtcatattaatttttttaatttaacatctttgaatactttaattaggtatttgattagccgttttagaaatttaatatagttgaaactccatgtgtgaaacacgtaatattaactaagaaatattgactacaaagagaaaataaaagtaaaatggcttcacataattaatcaatcatcggtttatatctccaaatttaaacaaataaatcgatttataatattttcttcgtgaaattatttgaatcaatctaaaggtttggtttgtaaaacttctatacaatgaggttctccatgacttgttaacactaatcttagaggagaagagtttctggatagcgggttaaacggtttggaagagcagttcggatctggcatgaaaacaatgaacataatccaatatatgtgccaaatatctacataaagttgggctttcaaaattgttaactcacgtgatcatgatacgtgtcaaatttattagtgaaatatccacccttatcaaatcaaattttgttatttttagggttttgtgcaaaataaaaccctctaactcatctatttttgcatctttattctccacctccaaaaaatgcataattatccgatgaagtctaaaataatacgcaatgtaaccccttttcgtcatttttctacgacaatattttgtaagatattgatatttaatatgtttaatcgaagccttctcgacgaaaagttcaaatcgaccttcgaaatattaaaaatctaatctatgggagtgtaaaaaagtttacaatatacgtataagggtcatattgcgtattattttagacttcataagattaatatgtgtttgttagagatatagggtaaaattgcaaaactagatgagttagatgggtgttttgcacaaaaccctatatttttaaaaaacaaaatatagaaaaatttcataaccccatcggatatatacacaagtaaaaaaaatagttcatatatacaaattttttatttactatattaaaatattgaacaaattctattaaaaatcgtttacatattcaaaacagaagtaaaagttccctattttgttttagaaaaatattaatacgtgatttaatattttctaattttgtaacttaaatatgtctctctttttatttcttaatattatttcattttatttttttctcaattacagagttctattcgtttaccacaaaattcaatgagacgctctgtctggtgcgtcttttatagatgttgtatgttttccttgtcttatctttcttttatactttgagaaatcccgtattatatataattagtaaaggcatggtatatggaatgtatataattgaaatattcttttgaaatatacccgattactatttagaatttttatatcatcacaacatttctcacaccagcatatttggacgagtcttatctaataaaattataaaccactctcagattttgtgttatgacatatttcaaagatttatggaaacaatttgaaggtctgtaacattgtaagactaaattcaattatggactcgatgtttcaaggtgttattcattagaagtgaagaatgtataaacatggaacccaaatgcaacttctcaaatgttattactatatcttcttctttttttaattattattataacatgtaacgtaagctaaaattttaaaaaaataagttgaaaaagttatctattttaaaaataagataaaacactattttggtatgggaggagttgcaccggcaactcttgaacatttttcctttagcatcggaggaaaaaatggaatgaatggaattttcggtatgcaattatcggcgtccaaaaatgctttgcaacaagccggacctaaattaccgaactttccagtgaaaatggattgagaaatctctacaatgcatccaggaatatccatcacggatgagaaacattttgttatatcaggtaatccaggaatcagttggaacggaaacagaaaaggaagttgagccggaaactgaggcaattgagcatttacagaaactatgatacatagaaccgctagaagtaaaaacacatttttgatagacataatgagaaattgagtaaaaagtctgagtatagcaactatatgcttaatgctttgtttgtttttgattgatgaataacaataaaatcattgcttatttatatggattgaaatgtgaaactgtcatattaattttttttaatttaacatctttgaatactttaattaggtatttgattagccgttttagaaatttaatatagttgaaactccatgtgtgaaacacgtaacaataactaagaaatattgactacaaagagaaaataaaagtaaaatggcttcacataattaatcaatcatcggtttatatctccaaatttaaacaaataaatcgatttataatattttcttcgtgaaattatttgaatcaatctaaaggtttggtttttaaaacttctatacaatgaggttctccatgacttgttaacactaaacttagaggagaagagtttctggatagcgggttaaacggtttggaagagcagttcggatctggcatgaaaacaatgaacataatccaatatatgtgccaaatatctacataaagttgggctttcaaaattgttaactcacgtgatcatgatacgtgtcaaatttattagtgaaatatccacccttatcaaatcaaattttgttatttttagggttttgtgcaaaataaaaccctctaactcatctatttttgcatctttattctccacctccaaaaaatgcataattatccgatgaagtctaaaataatacgcaatgtaaccccttttcgtcatttttctacgacaatattttgtaagatattgatatttaatatgtttaatcgaagccttctcgacgaaaagttcaaatcgaccttcgaaatattaaaaatctaatctatgggagtgtaaaaaagtttacaatatacgtataagggtcatattgcgtattattttagacttcataagattaatatgtgtttgttagagatatagggtaaaattgcaaaactagatgagttagatgggtgttttgcacaaaaccctatatttttaaaaaacaaaatatagaaaaatttcataaccccatcggatatatacacaagtaaaaaaaaagttcatatatacaaattttttatttactatattaaaatattgaacaaattctattaaaaatcgtttatatattcaaaacagaagtaaaagttccctattttgttttagaaaaatattaatacgtgatttaatattttctaattttgtaacttaaatatgtctctctttttatttcttaatattatttcattttatttttttctcaattacagagttctattcgtttaccacaaaattcaatgagaggctctgtctggtgcgtcttttatagatgttgtatgttttccttgtcttatctttcttttatactttgagaaatcccgtattatatataattagtaaaggcatggtatatggaatgtatataattgaaatattcttttgaaatatacccgattactctttagaatttttatatcatcacaacatttctcacaccagcatatttggacgagtcttatctaataaaattataaaccactctcagattttgtgttatgacatatttcaaagatttatggaaacaatttgaaggtctgtaacattgtaagactaaattcaattatggactcgatgtttcaaggtgttattcattagaagtgaagaatgtataaacatggaacccaaatgcaacttctcaaatgttattactatatcttcttcttttttttaattattattataacatgtaacgtaagctaaaattttaaaaaaataagttgaaaaagttatctattttaaaaataagataaaacactattttggtatgggaggagttgtaccggcaactcttgaacattgttcctttagcatcggaggaaaaaatggaatgaatggaattttcggtatgcaattatcggcgtccaaaaatgctttgcaacaagccggacctaaattaccgaactttccagtgaaaatagattgagaaatctctgcaatgcatccaggaatatccatcacggatgagaaacattttgttatatcaggtaatccaggaatcatttggaacggaaacagaaaaggaagttgagccggaaactgaggcaattgagcatttacagaaactatgatacatagaaccgctagaagtaaaaacacatttttgatagagataatgagaaattgagtaaaaagtcttagtatagcaactatatgcttaatgctttgtttgttcttgattgatgaataacaataaaatccttgcttatttatatggattgaaatgtgaaactgtcatattaatttttttttaatttaacatctttgaatactttaattaggtatttgactagccgttttagaaatttaatatagttgaaactccatgtgtgaaacacgtaacattaactaagaaatattgactacaaagagaaaataaaagtaaaatggcttcacataattaatcaatcatcggtttatatctccaaatttaaacaaataaatcgatttataatattttcttcgtgaaattatttgaatcaatctaaaggtttggtttgtaaaacttctatacaatgaggttctccatgacttgttaacactaatcttagaggagaagagtttctggatagcgggttaaacggttgggaagagcagttcggatctggcatgaaaacaatgaacataatccaatatatgtgccaaatatctacataaagttgggctttcaaaattgttaactcacgtgatcatgacacgtgtcaaatttattagtgaaatatccacccttatcaaatcaaattttgttatttttagggttttgtgcaaaataaaaccctctaactcatctatttttgcatctttattctccacctccaaaaaatgcataattatccgatgaagtctaaaataatacgcaatgtaaccccttttcgtcatttttttctacgacaatattttgtaagatattgatatttaatatgtttaatcgaagccttctcgacgaaaagttcaaatcgaccttcgaaatattaaaaatctaatctatgggagtgtaaaaaagtttacaatatacgtataagggtcatattgcgtattattttagacttcataagattaatatgtgtttgttagagatatagggtaaaattgcaaaactagatgagttagatgggtgttttgcacaaaaccctatatttttaaaaaacaaaatatagaaaaatttcataaccccatcggatatatacacaagtaaaaaaaatagttcatatatacaaattttttatttactatattaaaatattgaacaaattctattaaaaatcgtttatatattcaaaacagaagtaaaagttccctattttgttttagaaaaatattaatacgtgatttaatattttctaattttgtaacttaaatatgtctctctttttatttcttaatattatttcattttatttttttctcaattacagagttctattcgtttaccacaaaattcaatgagaggctctgtctggtgcgtcttttatagatgttgtatgttttccttgtcttatctttcttttatactttgagaaatcccgtattatatataattagtaaaggcatggtatatggaatgtatataattgaaatattcttttgaaatatacccgattactatttagaatttttatatcatcacaacatttctcacaccagcatatttggacgagtcttatctaataaaattataaaccactctcagattttgtgttatgacatatttcaaagatttatggaaacaatttgaaggtctgtaacattgtaagactaaattcaattatggactcgatgtttcaaggtgttattcattagaagtgaagaatgtataaacatggaacccaaatgcaacttctcaaatgttattactatatcttcttcttttttttaattattattataacatgtaacgtaagctaaaattttaaaaaaataagttgaaaaagttatctattttaaaaataagataaaacactattttggtatgggaggagttgtaccggcaactcttgaacattgttcctttagcatcggaggaaaaaatggaatgaatggaattttcggtatgcaattatcggcgtccaaaaatgctttgcaacaagccggacctaaattaccgaactttccagtgaaaatagattgagaaatctctgcaatgcatccaggaatatccatcacggatgagaaacattttgttatatcaggtaatccaggaatcagttggaacggaaacagaaaaggaagttgagccggaaactgaggcaattgagcatttacagaaactatgatacatagaaccgctagaagtaaaaacacatttttgatagacataatgagaaattgagtaaaaagtcttagtatagcaacaatatgcttaatgctttgtttgtttttgattgatgaataacaataaaatccttgcttatttatatggattgaaatgtgaaactgtcatattaatttttttaatttaacatctttgaatactttaattaggtatttgattagccgttttagaaatttaatatagttgaaactccatgtgtgaaacacgtaacattaactaagaaatattgactacaaagagaaaataaaagtaaaatggcttcacataattaatcaatcatcggtttatatctccaaatttaaacaaataaatcgatttataatattttcttcgtgaaattatttgaatcaatctaaaggtttggtttgtaaaacttctatacaatgaggttctccatgacttgttaacactaatcttagaggagaagagtttctgggtagcgggttaaacggttgggaagagcagttcggatctggcatgaaaacaatgaacataatccaatatatgtgccaaatatctacataaagttgggctttcaaaattgttaactcacgtgatcatgacacgtgtcaaatttattagtgaaatatccacccttatcaaatcaaattttgttatttttagggttttgtgcaaaataaaaccctctaactcatctatttttgcatctttattctccacctccaaaaaatgcataattatccgatgaagtctaaaataatacgcaatgtaaccccttttcgtcatttttctacgacaatattttgtaagatattgatatttaatatgtttaatcgaagccttctcgacgaaaagttcaaatcgaccttcgaaatattaaaaatctaatctatgggagtgtaaaaaagtttacaatatacgtataagggtcatattgcgtattattttagacttcataagattaatatgtgtttgttagagatatagggtaaaattgcaaaactagatgagttagatgggtgttttgcacaaaaccctatatttttaaaaaacaaaatatagaaaaatttcataaccccatcggatatatacacaagtaaaaaaaatagttcatatatacaaattttttatttactatattaaaatattgaacaaattctattaaaaatcgtttatatattcaaaacagaagtaaaagttccctattttgttttagaaaaatattaatacctgatttaatattttctagttttgtaacttaaatatgtctctctttttatttcttaatattatttcatttttttttttctcaattacagagttctattcgtttaccacaaaattcagtgaaaggctctgtttggtgcgtcttttatagatgttgtatgttttccttgtcttatctttcttttatactttgagaaatcccgtattatatataattagtaaaggcatggtatatggaatgtatataattgaaatattcttttgaaaaataccgattactatttagaatttttatatcatcacaacatttctcacaccagcatatttggacgagtcttatctaataaaattataaaccactctcagattttgtgttatgacatatttcaaagatttatggaaacaatttgaaggtctgtaacattgtaagactaaattcaattatgaactcgatgtttcaaggtgttattcattagaagtgaagaatgtataaacatggaacccaaatgcaacttctcaaatgttattactatatcttcttcttttttaattattattataacatgtaacgtaagctaaaattttaaaaaaataagttaaaaaagttatctattttaaaaataagataaaacactattttggtatgggaggagttgcaccggcaactcttgaacattgttcctttagcatcggaggaaaaaatggaatgaatggaattttcggtatgcaattatcggcgtccagaaatgctttgcaacaagtcggacctaaattaccgaactttccagtgaaaatggattgagaaatctctacaatgcatccaggaatatccatcacggatgagaaacattttgttatatcaggtaatccaggaatcagttagaacgaaaacggaaaaggaagttgagccggaaactgaggcaattgagcatttacagaaactatgatacatagaaccgctagaagtgaaaacacatttttgatagacataatgagaaattgagttaaaagtcttagtatagcaactatatgcttaatgctttgtttgtttttgattgatgaataacaataaaatccttgcttatttatatggattgaaatgtgaaactgtcatattaatttttttaatttaacatctttgaatactttaattaggtatttgattagccgttttagaaatttaatatagttgaaactccatgtgtgaaacccgtaacattaactaagaaatattgactacaaagagaaaacaaaagtaaaatggcttcacataattaatcaatcatcggtttatatctccaaatttaaacaaataaatcgatttataatattttcttcgtgaaattatttgaatcaatctaaaggtttggtttgtaaaacttctatacaatgaggatctccatgacttgttaacactaaacttagaggagaagagtttctggatagcgggttaaacggttgggaagagcagttcggatctggcatgaaaacaatgaacataatctaatatatgtgccaaatatctacataaagttgggctttcaaaattgttaactcacgtgatcatgacacgtgtcaaatttattagtgaaatatccacccttatcaaatcaaattttgttatttttagggttttgtgcaaaataaaaccctctaactcatctatttttgcatctttattctccacctccaaaaaatgcataattatccgatgaagtctaaaataatacgcaatgtaaccccttttcgtcatttttctacgacaatattttgtaagatattgatatttaatatgtttaatcgaagccttctcgacgaaaagttcaaatcgaccttcgaaatattaaaaatctaatctatgggagtgtaaaaaagtttacaatatacgtataagggtcatattgcgtattattttagacttcataagattaatatgtgtttgttagagatatagggtaaaattgcaaaactagatgagttagatgggtgttttgcacaaaaccctatattttaaaaaaacaaaatatagaaaaatttcataaccccatcggatatatacacaagtaaaaaaaatagttcatatatacaaattttttattcactatattaaaatattgaacaaattctattaaaaatcgtttatatattcaaaacagaagtaaaagttccctattttgttttagaaaaatattaatacgtgatttaatattttctagttttgtaacttaaatatgtctctctttttatttcttaatattatttctttttttttttctcaattacagagttctattcgtttaccacaaaattcagtgaaaggctctgtttggtgcgtcttttatagatgttgtatgttttccttgtcttatctttctttatactttgagaaatcccgtattatatataattagtaaaggcatggtatatggaatgtatataattgaaatattcttgtgaaaaatactgattactatttagaatttttatatcatcacaacatttctcacaccagcatatttggacgagtcttatctaataaaattataaaccactctcagattttgtgttatgacatatttcaaagatttatggaaacaatttgaaggtctgtaacattgtaagactaaattcaattatggactcgatgtttcaaggtgttattcattagaagtgaagaatgtataaacatggaacccaaatgcaacttctcaaatgttattactatatcttcttctttttttaattattattataacatgtaacgtaagctaaaattttaaaaaaataagttgaaaaagttatctattttaaaaataagataaaacactattttggtatgggaggagttgtaccggcaactcttgaacattgttcctttagcatcggaggaaaaaatggaatgaatggaattttcggtatgcaattatcggcgtccaaaaatgctttgcaacaagtcggacctaaattaccgaactttccagtgaaaatggattgagaaatctctgcaatgcatccaggaatatccatcacggatgagaaacattttgttatatcaggtaatccaggaatcagttggaacggaaacagaaaaggaagttgagccggaaactgaggcaattgagcatttacagaaactatgatacatagaaccgctagaagtgaaaacacatttttgatagacataatgagaaattgagtaaaaagtcttagtatagcaacaatatgcttaatgctttgtttgtttttgattgatgaataacaataaaatccttgcttatttatatggattgaaatgtgaaactgtcatattaatttttttaatttaacatctttgaatactttaattaggtatttgattagccgttttataaatttaataaagttgaaactccatgtgtgaaacacgtaacattaactaagaaatattgactacaaagagaaaataaaagtaaaatagcttcacataattaatcaatcatcggtttatatctccaaatttaaacaaataaatcgatttatgatatttttttcgtgaaattatttgaatcaatctaaaggtttggtttgtaaaacttctatacaatgaggttctccatgacttgttaacactaaacttagaggagaagagtttctggatagcgggttaaacggttgggaagagcagttctgatctggcatgaaaacaatgaacataatccaatatatgtgccaaatatctacataaagttggctttccaaattgttaactcacgtgatcatgacacgtgtcaaatttataagtgaaatatccacccttatcaaatcaaattttgttagttttagggttttgtgcaaaataaaaccctctaactcatctatttttgcatctttattctccacctccaaaaaatgcataattatccgatgaagtctaaaataatacgcaatgtaaccccttttcgtcatttttctacgacaatattttgtaaaatattgatatttaatatgtttaatcgaagccttctcgacgaaaagttcaaatcgaccttcgaaatattaaaaatctaatatatgggagtgtaaaaaagtttacaatatacgtataagggtcatattgcgtattattttagacttcataagattaatatgtgtttgttagagatatagggtaaaattgcaaaactagataagttagatgggtgttttgcacaaaaccctatatttttaaaaaacaaaatatagaaaaatttcataaccccatcggatatatacacaagtaaaaaaaatagttcatatatacaaattttttatttactatattaaaatattgaacaaattctattaaaaatcgtttatatattcaaaacagaagtaaaagttccctattttgttttagaaaaatactaatacgtgattaatattttctaattttgtaacttaaatatgtctctctttttatttcttaatattatttcatttcatttttttctcaattacagagttctattcgtttaccacaaaattcagtgagaggctctgtttggtgcgtcttttatagatgttgtatgttttctttgtcttatctttcttttatactttgagaaatcccgtattatatataattagtaaaggcatggtatatggattgtatataattgaaatattcttttgaaaaatactgattactatttagaatttttatatcatcacaacatttctcacaccagcataattagacgagtcttatctaataaaattataaaccactctcagattttgtgttatgacatatttaaagatttattgaaacaatttgaaggtttgtaacattgtaagactaaattcaattatggactcgatgtttcaaggtgttattcattagaattgaagaatgtataaacatggaacccaaatgcaacttctcaaatgttattactatatcttcttctttttttaattattattataacatgtaacgtaagctaaaattttaaaaaaataagttaaaaaagttatctattttaaaaataagataaaacactattttggtatgggaggagttgcaccggcaactcttgaacattgttcctttagcatcggaggaaaaaatggaatgaatggaatttttggtatgcaattatcggcgtccagaaatgctttgcaacaagtcggacctaaattaccgaactttccagtgaaaatggattgagaaatctctacaatgcatccaggaatatccatcacggatgagaaacattttgttatatcaggtaatccaggaatcagttggaacggaaacagaaaaggaagttgagccggaaactgaggcaattgagcatttacagaaactatgatacatagaaccgctagaagtaaaaacacatttttgatagacataatgagaaattgagtaaaaagtcttagtatagcaactatatgcttaatgctttgtttgtttttgattgatgaataacaataaaatcctagcttatttatatggattgaaatatgaaactgtcatattaatttttttaatttaacatctttgaatactttaattaggtatttgattagccgttttataaatttaataaagttgaaactccatgtgtgaaacacgtaacaataactaagaaatattgactacaaagagaaaataaaagtaaaatagcttcacataattaatcaatcatcggtttatatctccaaatttaaacaaataaatcgatttataatattttcttcgtgaaattatttgaatcaatctaaaggtttggtttgtaatacttctatacaatgaggttctccatgacttgttaacactaaacttagatgagaagagtttctggatagcgggttaaacggttggaaagagcagttcggatcgggtatgaaaacaatgaacataatccaatatatgtgctaaatatctacataaagttgggttttcaaaattgttaactcaggtgatcatgacatgtgtcaaatatattagtgaaatatccacatatatcaaatcaaattttgttatttttagaattttgtgcaaacaaaaaccctctaactcatctatttttgcatctttattctccacctccaaaaaatgcataattatccgatgaactctaaaataatacgcaatgtaacccctttttcgtcgtttttttctacgacaatattttgtaagatattgatatttaatatatttaattgaagccttctcgacgaaaagttcaactcgaccttcgaaattttaaaaatctaatctttatgagtgtaaaaacatttacaatatatatataagggtcatattgtgtattattttagacttcataggattaatatgtgtttgttagagatatagggtaaaattgcaaaactagatgagttagatgggtgttttgcacaaaaccctatatttttaaaaaacaaaatatagaaaaatttcataaccccatcggatatatacacaagtaaaaaaaatcattcatatatacaaattttttatttactatattaaaatattgaacaaattctattaaaaatcgtttatatattcaaaacagaagtaaaagttccctattttgttttagaaaaatattaatacgtgatttaatattttctaatttcgtaacttaaatatgtctctctttttatttcttaattttatttcatttcattttttcctcaattacagagttcaattcgtttaccacaaaattcaatgagaggctctgtttggtgcgtctttttatagatggtgtatgttttccttgtcttatctttctttatactttgagaaatctcgtattatatataattagtaaagtcatggtatatagaatgtatataattgaaatattcttttgaaaaataccgattactatttagaatttttatatcatcactacatttctcacaccagcatatttggatgagtcttatctaataaaattataaaccactctcagattttgtgttacactacaagaaaacagtcaatttgcgaggaagggttgcgagggaaggcattcctcgcaattattgcgagggtattgcgtgaaacttgctacgtaccgcacgcgagtagcaattccgtcgcaaaacttgcgagggaagacttcctcgcaaatttgcgagggaagtacgatggtttcgcaagaaagatattatccgtcgcaaatcccaagcagatacgtcgcaaatctttaccctaaaccctaaaatacataaaagtgtattgcaatctttgattttcatttatagatatgaattcaagtagattatatggtttgaacaaaaaaatattgtattggtttcaatattaacatttcattttgaaaatgttaaacattcatgattcatatttaatgaaaaccataagatcatcattgatgtatttggggaaaaaacacattcgaattatatgatgataaaataggttcaaatgaagataattaacgttctaatgatttaaaaaaatgaatccaaatgattttgaatagtgattgttgtatttttcaaaattgattatacattgcgaggaatttgcgaggtgtttgctagtacgcgtagcagttccctcgcaatatttacactaaaccctaaaatatttagaatttttagtcatgttcttattttgctgagggtcttactagaaataggagagactgaatcaaatataattattgaattttgattggtttaaaatacgattcctcgtaatttcctggcaaggtctgcgagggatttgctaggcgttctcgcagttccctcgcaatgtaagctgcattttgattggtttaaaagacggttcctcgcaatttcctagcaaggtttgcgagggatttgcgaggatatatattcttatatatactcgataacctagtttgagcagagctcaaacctgccgcatcaaaccctaaacctaattttttttcttcgattctcttcttctccgatctgttttcctcgtcgccggcttctcttcttctccgatctattttcttcgccgccgcctctcttcttcttcgatctgattacgtcgccgcctcttattctccagcagccgccgcaactcttcttctccaggttcagccgcgagtcgatctgtttcttctccaaggtaacgtcttcttctccgatataacttcttctttccattccaacttccaccgtccgatctaacttcttcttcttctccgttgcggttcgtcttctcctgcagtcgtcgcgactcttcttctccagcagccgtcgcgactcttcttctccagcagccgtcgcgactcttcttctccagcagcagtcgcgactcgatctcttttgcctccaaggtaacgtcttcttctccgatctaactgcttcactccgatctaacttcttcttcatctccgatctgacattgttttccagatctaatctgttctagtttacggatctaaactctgtcaatcatttgttctgcttctgcttttgcttctctccgatctaacttcttcttcatcgcttctaggttttgtttgttttgcaagatgccgtcgtcggagaatacttatgcacgatataggtcacagcagggagacccgttgcatgtcaattctcctgtcagtgctgggaatatttcaggggttcaaggttcacgccatccaccatcacctccaacgccaaccactcagccttctgtcaatgattctgattctcaagctgagcgtctcaacaatctcacactggaggagcttcttgatagtcctggtcgtgctggcttgacaaggctagacccaaagcgtcctccgggaactctctggtaaggttaaattcattgtcctagaacagcttaggttgtagtgccttagaactttgtagtgccttggagcgtaatggaattaggttgtagtgccttaggttgtagtgccttggagcgtaatggaattaggttgtagtgccttaggttgtagtgccttagaagtttcaacaaatagaacagcttggttgtacttagcattgtgatgtcttagaagtttaaagacatagaaatccttatgtgtgggctggttggtcttcttgtaggtttgacgatgaccctgcatttgcagcaacagtccgcagcatctttgaaagagatttcaaagaacctcatgccaattggtcacaaacatcaaaggctacaatcgatcgatggtatgaaacgtttgtggtaagttttgtgctcttttgatgtttatgcttgttttgtgtatggtttcatttctgatgttagcttctcttttgtagcaagtatataactgggaccgttcaattaacaaaagagtaagggttgagtttgaagcaaagctaaagtctaggatgactgatcaagtgtcacggtggaagggaaattggaaggagaaaggtgatgaagccaagccaaaatggattgatcctgatgtgtggaaaggtcttgtactgttttggcaagatccaaagtcagaaaaaaagagtaacaacagcagaaatgctaggtatcatgatccggatggcaaaggcatctataaacaccgttcaggccagacctcatacaaagctcgtgcaagaaaacgagtaagataagtattcttctctccttaccattacttaatctagaattacatactgacatcttgtttatctctttgtgtttcagtgtgagaagactggagaaaaaactcctgatttccttgagctgctagatgagacacacagaaaagcggatggaagcttcatcgatgggaagtcagaggagatctacaagcaagtaacatctaggattgaagaggaagagtctcatatgagttcaggggacaatccggagagcactggatcaggtggactttctgttcatgtcaaaaacaagatatttactgaggtaaattttatgtgctctttctgttgtctacttgataatcactgttagcgttgtctacttgataatcactgttagcgttgtctagttgtgtctgaaatctgattgtgttgtctgaaatctgattgtgttgtctgaaatcttattgacagcttattgtgttgtctgaaatcttgacagcttattcattatactttgtgtagtgttgtgtttgaattgctttctattgcaagtgtggttgtgttgtctacttaataatcactgttagcgttgtctagttgtgtctgaaatcttattgtgttgtctgaaatcttattgacaacttattgtgttgtctgaaatcttattgacaacttattgtgttgtctgaaatcttgacagcttattgtgtttgaattcttttgtcttgtgttgaacttgttttctcacttgttttctgttgtgtccttgtgagtttttgtgacctttgcaggttgctccgagaaagaaaggaaggatttatggtcttggatctctgcagtttgaagcatcctcagctcatagtggtccaacacttcctagtgatgatccggttatactttctgcgaagctggctgccgctgaagcttgcattcaaaatcaggctgagaagatcaacagctttgatatcctctttgactatcttgctgagaaagatccagctttagctgccattcttcgacgaggttcctcgacacagacaagaccggttagcgcaaatgaaccacctgtagctacagctccagaacagcaagccaatgaggagacagctgctgctgctgccctagctaaccttgcaacaggatcctctccatcatcagtattttgagaacattgtctttctcttttttccttgtaatctttttagaacatggtttcaaatattggcattgtagtatacattttagataatgataatttcagcttcttcttcttcttcttgtgtctttatttaagaatcaaaaataatctctaatcaacaactaattaaccagataattagagtctaattaaccactaatcaagccttaatatatcaggaaatcagttgcaaagcacttgcaaatccatcgcaaatattgcgatggacttgctaggcagaaagaaaagaatcgcaaatctctcgcaacaattgcgagggaagtactagaactgtgttgcgtgtgttttgcgaggaaaacagttcctcgcaaaatttgcgaggaaaacagttcctcgcaaaatttgcgagggaattgcgactttttaccatttgcgagaagcgatttgcgaggaacttgatttcgtcgcaagtccctcgcgtatggctgtttgcgagggattagcgagtaattcttccctcgcaaaacgacggttttcttgtagggttatgacatatttcaaagatttatggaaacaatttgaaggtttgtaacattgtaagactaaattcaattatggacttgatgtttcaaggtgttattcattagaatgaaaaatgtataaacatggaacccaaatgcaacttctcaaatgttattactatatctttttcttttttaattattattataacatgtaacgtaagctaaaatttttaaaaaataagttgaaaaagttatctattttaaaaataagataaaacactattttggtatgggaggagttgcaccggcaactcttgaacattgttcctttagcatcggaggaaaaaatggaatgaatggaattttcggtttgcaattatcggtgtccaaaaatgctttgcaacaagccggacctaaattaccgaactttccagtgaaaatagattgagaaatctctgcaatgcatccaggaatatccatcacggatgagaaacattttgttatatcaggtaatccaggaatcagttggaacggaaacagaaaaaggaagttgagccggaaactgaggcaattgagcatttacagaaactatgatacatagaaccgctagaagtgaaaacacatttttgataaacataatgagaaattgagtaaaaagtcttagtatagcaactatatgcttaatactttgtttgtttttgattgataaataacaataaaatccttgcttatttatatggattgaaatgtgaaactgtcatattaatttttttaatttaacatctttgaatattttaattaggtatttgattagccgttttataaatttaataaagttgaaactccatgtgtgaaacacgtaacattaactaagaaatattgactacaaagagaaaataaaagtaatatagcttcacataattaatcaatcatcggtttatatctccaaatttaaacaaataaatcgatttataatattttcttcgtgaaattatttgaatcaatctaaaggtttggtttgtaaaacttctatacgatgaggttctccatgacttgttaacactaaacttagaggagaagagtttctggatagcgggttaaacggttggaaagagcagttcggatcggttatgaaaacaatgaacataatccaatatatgtgctaaatatctacataaagttgggttttcaaaattgttaactcatgtgatcgtgacacgtgtcaaatttattagtgaaatatccaaacatatcaaatcaaattttgttatttttaggattttgtgcaaacaaaaaccctctaactcatctatttttgcatctttattctccacctccaaaaaatgcataattatccaatgaactctaaaataatacgcaatgtaacccctttttgtcgtttttttctacgacaatattttgtaagatattaatattttaatatatttaatcgaagccttttcgacgaaaagttcaactcgacctttgaaattttaaaaatctaatctttatgagtgtaaaaacgtttacaatatatataagggtcatattgtatattattttagacttcataggattaatatgtgtttgttagagatatatagtaaaattgcaaaactatatgagttagatgtgtgttttgcacaaaaccctatattttttaaaaacaaaatatagaaaaatttcataaccccatcggatatatacacaagtaaaaaaatcattcatatatacaatttttttatttactatattaaaatattgaacaaattctattaaaaatcgtttatatattcaaaacagaagtaaaagttccctattttgttttagaaaaatattaatacgtgatttaatattttctaattttgtaacttaaatatgtctctctttttatttcttaattttatttcattttagtttttcctcaattacagagttcaattcgtttaccacaaaatttagtgagaggctctgtttggtgcgtctttttatagatggtgtatgttatccttgtcttatctttctttatactttgagaaatctcgtattatatataattagtaaaggcatggtatataccatgtatataattgaaatattcttttgaaaaataccgattactatttagaatttttatatcatcactacatttctcacaccagcatatttggacgagtcttatctaataaaattataaaccactctcagattttgtgttatgacatatttcaaagatttatggaaacaatttgaacgtttgtaacattgtaagactaaattcaattatggacttgatgtttcaaagtgttattcattagaatgaaaaatgtataaacatggaacccaaatgcaacttctcaaatgttattactatatctttttcttttttaattattattataacatgtaacgtaagctaaaatttttaaaaaataagttgaaaaagttatctattttaaaaataagataaaacactattttggtatgggaggagttgcaccggcaactcttgaacattgttcctttagcatcggaggaaaaaatggaatgaatggaattttcggtatgcaattatcggtgtccaaaaatgctttgcaacaagccggacctaaattaccgaactttccagtgaaaatagattgagaaatctctgcaatgcatccaggaatatccatcacggatgagaaacattttgttatatcaggtaatccaggaatcagttggaacggaaacggaaaaggaagttgagccggatactgaggcaattgagcatttacagaaactatgatacatagaaccgctagaactgaaaacacatttttgataaacataatgagaaattgagtaaaaagtcttagtatagcaactatatgcttaatactttgtttgtttttgattgataaataacaataaaatccttgcttatttatatggattgaaatgtgaaactgtcatattaatttttttaatttaacatctttgaatactttaattaggtatttgattagccgttttataaatttaataaagttgaaactccatgtgtgaaacacgtaacattaactaagaaatattgactacaaagagaaaataaaagtaatatagcttcacataattaatcaatcatcggttcatatctccaaatttaaacaaataaatcgatttataatattttcttcgtgaaattatttgaatcaatctaaaggtttggtttgtaaaacttctatacgatgaggttctccatgacttgttaacactaaacttagaggagaagagtttctggatagcgggttaaacggttggaaagagcagttcggatcgggtatgaaaacgatgaacataatccaatatatgtgctaaatatctacataaagttgggtttcaaaattgttaactcacgtgatcgtgacacgtgtcaaatttattagtgaaatatccaaacatatcaaatcaaattttgttatttttaggattttgtgcaaacaaaaaccctctaactcatctatttttgcatctttattctccacctccaaaaaatgcataattatccgatgaactctaaaataatacgcaatataaccccttttttgtcatttttttctacgacaatattttgtaagatatttatatttaatatatttaatcgaagccttttcgacgaaaagttcaactcgaccttcgaaattttaaaaatctaatctttatgagtgtaaaaacgtttacaatatatatataagggtcatattgtgtattattttagacttcataggattaatatgtgtttgttagagatatagggtaaaattgcaaaactataagagttagatgggtgttttgcacaaaaccctatatttttaaaaaacaaaatatagaaaaatttcataaccccatcggatatatacacaagtaaaaaaaatcattcatatatacaatttttttatttactatattaaaatattgaacaaattctattaaaaatcgtttatatattcaaaacagaagtaaaagttccctattttgttttagaaaaatattaatacgtgatttaatattttctaatttcgtaacttaaatatgtctctctttttatttcttaattttatttcatttcattttttcctcaattacagagttcaattcgtttaccacaaaattcaatgagaggctctgtttggtgcgtctttttatagatggtgtatgttttccttgtcttatctttctttatactttgagaaatctcgtattatatataattagtaaaggcatggtatatagaatgtatataattgaaatattcttttgaaaaataccgattactatttagaatttttatatcatcacaacatttctcacaccagcatatttatacgagtcttatctaataaaattataaaccactctcagattttgtgttatgacatattttaaagatttatggaaacaatttgaagttctgtaacattgtaagactaaattcaattatggactcgatgtttcaaggtgttatttattagaattgaagaatgaataaacatggaacccaaatgcaacttctcaaatgttattactatatcttcttctttttcttaattattattataacatgtaacgtaagctaaaattttaacagaaataagttgaaaaagttatctattttaaaaataagttaaaacactattttggtatgggaggagttgcaccggcaactcttgaacattgttcctttagcatcggaggaaaaaacggaatgaattcggtatgcaattatcggcgtccaaaaatgctttgcaacaagccggacttaaattaccaaactttccagtaaaaatggattgagaaatctctgcaatgcattcaggaatatccatcacggatgagaaacatttagttatatcaggtaatccaggaatcagttggaacggaaacggaaaaggaagttgagccggaaactgaggcaattgagcatttacagaaactatgatacatagaaccgctagaagtgaaaacacatttttgatagacataatgagaaattgagtaaaaagtcttagtattgcaacaatatgcttaatgctttgtttgtttttgattgatgaataacaataaaatccttgcttatttatatggattgaaatgtgaaactgtcatattaatttttttaatttaacatctttgaatactttaattaggtatttgattagccgtttttataaatttaataaagttgaaactccatgtgtgaaacacgtaacattaactaagaaatattgactacaaagagaaaataaaagtaatatagcttcacataattaatcaatcatcggttcatatctccaaatttaaacaaataaatcgatttataatattttcttcgtgaaattatttgaatcaatctaaaggtttggtttgtaaaacttctatacgatgaggttctccatgacttgttaacactaaacttagaggagaagagtttctggatagcgggttaaacggttggaaagagcagttcggatcgggtatgaaaacgatgaacataatccaatatatgtgctaaatatctacataaagttgggttttcaaaattgttaactcacgtgatcgtgacacgtgtcaaatttattagtgaaatatccaaacatatcaaatcaaattttgttatttttaggattttgtgcaaacaaaaaccctctaactcatctatttttgcatctttattctccacctccaaaaaatgcataattatccgatgaactctaaaataatacgcaatgtaaccccttttttgtcatttttttctacgacaatattttgtaagatatttatatttaatatatttaatcgaagccttttcgacgaaaagttcaactcgaccttcgaaattttaaaaatctaatctttatgagtgtaaaaacgtttacaatatatatataagggtcatattgtgtattattttagacttcataggattaatatgtgtttgttagagatatagggtaaaattgcaaaactataagagttagatgggt

SEQ ID NO: 1481 - DNA, 83663 bp, Arabidopsis thaliana
gaattcaagtagattatatggtttgaacaaaaaaatattgtattggtttcaatattaacatttcattttgaaaatgttaaacattcatgattcatatttaatgaaaaccataagatcatcattgatgtatttggggaaaaaacacattcgaattatatgatgataaaataggttcaaatgaagataattaacgttctaatgatttaaaaaaatgaatccaaatgattttgaatagtgattgttgtatttttcaaaattgattatacattgcgaggaatttgcgaggtgtttgctagtacgcgtagcagttccctcgcaatatttacactaaaccctaaaatatttagaatttttagtcatgttcttattttgctgagggtcttactagaaataggagagactgaatcaaatataattattgaattttgattggtttaaaatacgattcctcgtaatttcctggcaaggtctgcgagggatttgctaggcgttctcgcagttccctcgcaatgtaagctgcattttgattggtttaaaagacggttcctcgcaatttcctagcaaggtttgcgagggatttgcgaggatatatattcttatatatactcgataacctagtttgagcagagctcaaacctgccgcatcaaaccctaaacctaattttttttcttcgattctcttcttctccgatctgttttcctcgtcgccggcttctcttcttctccgatctattttcttcgccgccgcctctcttcttcttcgatctgattacgtcgccgcctcttattctccagcagccgccgcaactcttcttctccaggttcagccgcgagtcgatctgtttcttctccaaggtaacgtcttcttctccgatataacttcttctttccattccaacttccaccgtccgatctaacttcttcttcttctccgttgcggttcgtcttctcctgcagtcgtcgcgactcttcttctccagcagccgtcgcgactcttcttctccagcagccgtcgcgactcttcttctccagcagcagtcgcgactcgatctcttttgcctccaaggtaacgtcttcttctccgatctaactgcttcactccgatctaacttcttcttcatctccgatctgacattgttttccagatctaatctgttctagtttacggatctaaactctgtcaatcatttgttctgcttctgcttttgcttctctccgatctaacttcttcttcatcgcttctaggttttgtttgttttgcaagatgccgtcgtcggagaatacttatgcacgatataggtcacagcagggagacccgttgcatgtcaattctcctgtcagtgctgggaatatttcaggggttcaaggttcacgccatccaccatcacctccaacgccaaccactcagccttctgtcaatgattctgattctcaagctgagcgtctcaacaatctcacactggaggagcttcttgatagtcctggtcgtgctggcttgacaaggctagacccaaagcgtcctccgggaactctctggtaaggttaaattcattgtcctagaacagcttaggttgtagtgccttagaactttgtagtgccttggagcgtaatggaattaggttgtagtgccttaggttgtagtgccttggagcgtaatggaattaggttgtagtgccttaggttgtagtgccttagaagtttcaacaaatagaacagcttggttgtacttagcattgtgatgtcttagaagtttaaagacatagaaatccttatgtgtgggctggttggtcttcttgtaggtttgacgatgaccctgcatttgcagcaacagtccgcagcatctttgaaagagatttcaaagaacctcatgccaattggtcacaaacatcaaaggctacaatcgatcgatggtatgaaacgtttgtggtaagttttgtgctcttttgatgtttatgcttgttttgtgtatggtttcatttctgatgttagcttctcttttgtagcaagtatataactgggaccgttcaattaacaaaagagtaagggttgagtttgaagcaaagctaaagtctaggatgactgatcaagtgtcacggtggaagggaaattggaaggagaaaggtgatgaagccaagccaaaatggattgatcctgatgtgtggaaaggtcttgtactgttttggcaagatccaaagtcagaaaaaaagagtaacaacagcagaaatgctaggtatcatgatccggatggcaaaggcatctataaacaccgttcaggccagacctcatacaaagctcgtgcaagaaaacgagtaagataagtattcttctctccttaccattacttaatctagaattacatactgacatcttgtttatctctttgtgtttcagtgtgagaagactggagaaaaaactcctgatttccttgagctgctagatgagacacacagaaaagcggatggaagcttcatcgatgggaagtcagaggagatctacaagcaagtaacatctaggattgaagaggaagagtctcatatgagttcaggggacaatccggagagcactggatcaggtggactttctgttcatgtcaaaaacaagatatttactgaggtaaattttatgtgctctttctgttgtctacttgataatcactgttagcgttgtctacttgataatcactgttagcgttgtctagttgtgtctgaaatctgattgtgttgtctgaaatctgattgtgttgtctgaaatcttattgacagcttattgtgttgtctgaaatcttgacagcttattcattatactttgtgtagtgttgtgtttgaattgctttctattgcaagtgtggttgtgttgtctacttaataatcactgttagcgttgtctagttgtgtctgaaatcttattgtgttgtctgaaatcttattgacaacttattgtgttgtctgaaatcttattgacaacttattgtgttgtctgaaatcttgacagcttattgtgtttgaattcttttgtcttgtgttgaacttgttttctcacttgttttctgttgtgtccttgtgagtttttgtgacctttgcaggttgctccgagaaagaaaggaaggatttatggtcttggatctctgcagtttgaagcatcctcagctcatagtggtccaacacttcctagtgatgatccggttatactttctgcgaagctggctgccgctgaagcttgcattcaaaatcaggctgagaagatcaacagctttgatatcctctttgactatcttgctgagaaagatccagctttagctgccattcttcgacgaggttcctcgacacagacaagaccggttagcgcaaatgaaccacctgtagctacagctccagaacagcaagccaatgaggagacagctgctgctgctgccctagctaaccttgcaacaggatcctctccatcatcagtattttgagaacattgtctttctcttttttccttgtaatctttttagaacatggtttcaaatattggcattgtagtatacattttagataatgataatttcagcttcttcttcttcttcttgtgtctttatttaagaatcaaaaataatctctaatcaacaactaattaaccagataattagagtctaattaaccactaatcaagccttaatatatcaggaaatcagttgcaaagcacttgcaaatccatcgcaaatattgcgatggacttgctaggcagaaagaaaagaatcgcaaatctctcgcaacaattgcgagggaagtactagaactgtgttgcgtgtgttttgcgaggaaaacagttcctcgcaaaatttgcgaggaaaacagttcctcgcaaaatttgcgagggaattgcgactttttaccatttgcgagaagcgatttgcgaggaacttgatttcgtcgcaagtccctcgcgtatggctgtttgcgagggattagcgagtaattcttccctcgcaaaacgacggttttcttgtagggttatgacatatttcaaagatttatggaaacaatttgaaggtttgtaacattgtaagactaaattcaattatggacttgatgtttcaaggtgttattcattagaatgaaaaatgtataaacatggaacccaaatgcaacttctcaaatgttattactatatctttttcttttttaattattattataacatgtaacgtaagctaaaatttttaaaaaataagttgaaaaagttatctattttaaaaataagataaaacactattttggtatgggaggagttgcaccggcaactcttgaacattgttcctttagcatcggaggaaaaaatggaatgaatggaattttcggtttgcaattatcggtgtccaaaaatgctttgcaacaagccggacctaaattaccgaactttccagtgaaaatagattgagaaatctctgcaatgcatccaggaatatccatcacggatgagaaacattttgttatatcaggtaatccaggaatcagttggaacggaaacagaaaaaggaagttgagccggaaactgaggcaattgagcatttacagaaactatgatacatagaaccgctagaagtgaaaacacatttttgataaacataatgagaaattgagtaaaaagtcttagtatagcaactatatgcttaatactttgtttgtttttgattgataaataacaataaaatccttgcttatttatatggattgaaatgtgaaactgtcatattaatttttttaatttaacatctttgaatattttaattaggtatttgattagccgttttataaatttaataaagttgaaactccatgtgtgaaacacgtaacattaactaagaaatattgactacaaagagaaaataaaagtaatatagcttcacataattaatcaatcatcggtttatatctccaaatttaaacaaataaatcgatttataatattttcttcgtgaaattatttgaatcaatctaaaggtttggtttgtaaaacttctatacgatgaggttctccatgacttgttaacactaaacttagaggagaagagtttctggatagcgggttaaacggttggaaagagcagttcggatcggttatgaaaacaatgaacataatccaatatatgtgctaaatatctacataaagttgggttttcaaaattgttaactcatgtgatcgtgacacgtgtcaaatttattagtgaaatatccaaacatatcaaatcaaattttgttatttttaggattttgtgcaaacaaaaaccctctaactcatctatttttgcatctttattctccacctccaaaaaatgcataattatccaatgaactctaaaataatacgcaatgtaacccctttttgtcgtttttttctacgacaatattttgtaagatattaatattttaatatatttaatcgaagccttttcgacgaaaagttcaactcgacctttgaaattttaaaaatctaatctttatgagtgtaaaaacgtttacaatatatataagggtcatattgtatattattttagacttcataggattaatatgtgtttgttagagatatatagtaaaattgcaaaactatatgagttagatgtgtgttttgcacaaaaccctatattttttaaaaacaaaatatagaaaaatttcataaccccatcggatatatacacaagtaaaaaaatcattcatatatacaatttttttatttactatattaaaatattgaacaaattctattaaaaatcgtttatatattcaaaacagaagtaaaagttccctattttgttttagaaaaatattaatacgtgatttaatattttctaattttgtaacttaaatatgtctctctttttatttcttaattttatttcattttagtttttcctcaattacagagttcaattcgtttaccacaaaatttagtgagaggctctgtttggtgcgtctttttatagatggtgtatgttatccttgtcttatctttctttatactttgagaaatctcgtattatatataattagtaaaggcatggtatataccatgtatataattgaaatattcttttgaaaaataccgattactatttagaatttttatatcatcactacatttctcacaccagcatatttggacgagtcttatctaataaaattataaaccactctcagattttgtgttatgacatatttcaaagatttatggaaacaatttgaacgtttgtaacattgtaagactaaattcaattatggacttgatgtttcaaagtgttattcattagaatgaaaaatgtataaacatggaacccaaatgcaacttctcaaatgttattactatatctttttcttttttaattattattataacatgtaacgtaagctaaaatttttaaaaaataagttgaaaaagttatctattttaaaaataagataaaacactattttggtatgggaggagttgcaccggcaactcttgaacattgttcctttagcatcggaggaaaaaatggaatgaatggaattttcggtatgcaattatcggtgtccaaaaatgctttgcaacaagccggacctaaattaccgaactttccagtgaaaatagattgagaaatctctgcaatgcatccaggaatatccatcacggatgagaaacattttgttatatcaggtaatccaggaatcagttggaacggaaacggaaaaggaagttgagccggatactgaggcaattgagcatttacagaaactatgatacatagaaccgctagaactgaaaacacatttttgataaacataatgagaaattgagtaaaaagtcttagtatagcaactatatgcttaatactttgtttgtttttgattgataaataacaataaaatccttgcttatttatatggattgaaatgtgaaactgtcatattaatttttttaatttaacatctttgaatactttaattaggtatttgattagccgttttataaatttaataaagttgaaactccatgtgtgaaacacgtaacattaactaagaaatattgactacaaagagaaaataaaagtaatatagcttcacataattaatcaatcatcggttcatatctccaaatttaaacaaataaatcgatttataatattttcttcgtgaaattatttgaatcaatctaaaggtttggtttgtaaaacttctatacgatgaggttctccatgacttgttaacactaaacttagaggagaagagtttctggatagcgggttaaacggttggaaagagcagttcggatcgggtatgaaaacgatgaacataatccaatatatgtgctaaatatctacataaagttgggtttcaaaattgttaactcacgtgatcgtgacacgtgtcaaatttattagtgaaatatccaaacatatcaaatcaaattttgttatttttaggattttgtgcaaacaaaaaccctctaactcatctatttttgcatctttattctccacctccaaaaaatgcataattatccgatgaactctaaaataatacgcaatataaccccttttttgtcatttttttctacgacaatattttgtaagatatttatatttaatatatttaatcgaagccttttcgacgaaaagttcaactcgaccttcgaaattttaaaaatctaatctttatgagtgtaaaaacgtttacaatatatatataagggtcatattgtgtattattttagacttcataggattaatatgtgtttgttagagatatagggtaaaattgcaaaactataagagttagatgggtgttttgcacaaaaccctatatttttaaaaaacaaaatatagaaaaatttcataaccccatcggatatatacacaagtaaaaaaaatcattcatatatacaatttttttatttactatattaaaatattgaacaaattctattaaaaatcgtttatatattcaaaacagaagtaaaagttccctattttgttttagaaaaatattaatacgtgatttaatattttctaatttcgtaacttaaatatgtctctctttttatttcttaattttatttcatttcattttttcctcaattacagagttcaattcgtttaccacaaaattcaatgagaggctctgtttggtgcgtctttttatagatggtgtatgttttccttgtcttatctttctttatactttgagaaatctcgtattatatataattagtaaaggcatggtatatagaatgtatataattgaaatattcttttgaaaaataccgattactatttagaatttttatatcatcacaacatttctcacaccagcatatttatacgagtcttatctaataaaattataaaccactctcagattttgtgttatgacatattttaaagatttatggaaacaatttgaagttctgtaacattgtaagactaaattcaattatggactcgatgtttcaaggtgttatttattagaattgaagaatgaataaacatggaacccaaatgcaacttctcaaatgttattactatatcttcttctttttcttaattattattataacatgtaacgtaagctaaaattttaacagaaataagttgaaaaagttatctattttaaaaataagttaaaacactattttggtatgggaggagttgcaccggcaactcttgaacattgttcctttagcatcggaggaaaaaacggaatgaattcggtatgcaattatcggcgtccaaaaatgctttgcaacaagccggacttaaattaccaaactttccagtaaaaatggattgagaaatctctgcaatgcattcaggaatatccatcacggatgagaaacatttagttatatcaggtaatccaggaatcagttggaacggaaacggaaaaggaagttgagccggaaactgaggcaattgagcatttacagaaactatgatacatagaaccgctagaagtgaaaacacatttttgatagacataatgagaaattgagtaaaaagtcttagtattgcaacaatatgcttaatgctttgtttgtttttgattgatgaataacaataaaatccttgcttatttatatggattgaaatgtgaaactgtcatattaatttttttaatttaacatctttgaatactttaattaggtatttgattagccgtttttataaatttaataaagttgaaactccatgtgtgaaacacgtaacattaactaagaaatattgactacaaagagaaaataaaagtaatatagcttcacataattaatcaatcatcggttcatatctccaaatttaaacaaataaatcgatttataatattttcttcgtgaaattatttgaatcaatctaaaggtttggtttgtaaaacttctatacgatgaggttctccatgacttgttaacactaaacttagaggagaagagtttctggatagcgggttaaacggttggaaagagcagttcggatcgggtatgaaaacgatgaacataatccaatatatgtgctaaatatctacataaagttgggttttcaaaattgttaactcacgtgatcgtgacacgtgtcaaatttattagtgaaatatccaaacatatcaaatcaaattttgttatttttaggattttgtgcaaacaaaaaccctctaactcatctatttttgcatctttattctccacctccaaaaaatgcataattatccgatgaactctaaaataatacgcaatgtaaccccttttttgtcatttttttctacgacaatattttgtaagatatttatatttaatatatttaatcgaagccttttcgacgaaaagttcaactcgaccttcgaaattttaaaaatctaatctttatgagtgtaaaaacgtttacaatatatatataagggtcatattgtgtattattttagacttcataggattaatatgtgtttgttagagatatagggtaaaattgcaaaactataagagttagatgggtgttttgcacaaaaccctatatttttaaaaaacaaaatatagaaaaatttcataaccccatcggatatatacacaagtaaaaaaaatcattcatatatacaatttttttatttactatattaaaatattgaacaaattctattaaaaatcgtttatatattcaaaacagaagtaaaagttccctattttgttttagaaaaatattaatacgtgatttaatattttctaatttcgtaacttaaatatgtctctctttttatttcttaattttatttcatttcattttttcctcaattacagagttcaattcgtttaccacaaaattcaatgagaggctctgtttggtgcgtctttttatagatggtgtatgttttccttgtcttatctttctttatactttgagaaatctcgtattatatataattagtaaagacatggtatatagaatgtatataattgaaatattcttttgaaaaataccgattactatttagaatttttatatcatcacaacatttctcacaccagcatatttagacgagtcttatctaataaaattataaaccactctcagattttgaagttctgtaacattgtaagactaaattcaattatggactcgatgtttcaaggtgttatttattagaattgaagaatgaataaacatggaacccaaatgcaacttctcaaatgttattactatatcttcttctttttcttaattattattataacatgtaacgtaagctaaaattttaacagaaataagttgaaaaagttatctattttaaaaataagttaaaacactattttggtatgggaggagttgcaccggcaactcttgaacattgttcctttagcatcggaggaaaaaacggaatgaatggaattttcggtatgcaattatcggcgtccaaaaatgctttgcaacaagccggacttaaattaccaaactttccagtaaaaatggattgagaaatctctgcaatgcattcaggaatatccatcacggatgagaaacatttagttatatcaggtaatccaggaatcagttggaacggaaacggaaaaggaagttgagccggaaactgaggcaattgagcatttacagaaactatgatacatagaaccgctagaagtgaaaacacatttttgatagacataatgagaaattgagtaaaaagtcttagtattgcaacaatatgcttaatgctttgtttgtttttgattgatgaataacaataaaatccttgcttatttatatggattgaaatgtgaaactgtcatattaatttttttaatttaacatctttgaatactttaattaggtatttgattagccgttttataaatttaataaagttgaaactccatgtgtgaaacaagtaacattaactaagaaatattgactactaagagaaaataaaagtaaaacggcttcacataattaatcaatcatcggtttatatctacaaatttaaacaaataaatcgatttataatattttcttcgtgaaattatttgaattaatctaaaggtttggtttgtaaaacttctatacaatgagtttctccatgacttgttaacactaaacttaaaggtgaagagtttctggatagcgggttaaacggttggaaatagcagttcggatcgggcatgaaaagaatgaacataatccaatatatgtgccaaatatctacataaatttgggttttgaaaattgttaactcacgtgatcatgactcgtgtcaaatttattagtgaaatatccacacatatcaaatcaaattttgttatttttagggttttgtgcaaacaaaaaccctctaactcatctattttgcatctttattctccacctccaaaaaatgcataattatcagataaaacctaaaatcatacgcaatataaccccttttcgtcatttttatctacaacaatattttgtaaaatattgatatttaatatgttaaatcgaagccttctcgaaaaaagcttaactcgaccttcaaaattttaaaaatctaatctatgggagtgtaaaaaagtttacaatatacgtataagggtcatattgcgtattattttagacttcataggattaatatgtgtttattagagatatagggtaaaattaaaaaactagatgagttagatgggtgttttgcacaaaaccctatatttttaaaaaacaaaatatagaaacatttcataaccccatcggatatatacacaagtaaaaaaaaatagttcatatatacaaatgttttatttaatatattaaaatattgaacaaattctaataaaaatcatttatatattcacaacagaagtaaaagttccctattttgttttagaaaaatattaatacgtgatataatattttctaattttgtaacttaaatatatctctctttttatttcttaattttatttcatttcatttttttctcaattacagagttcaattcgtttactacaaaattcagtgagaggctttgtttggtgcgtctttttatagatgttgtatgttttccttgttttatttttctttatactctgagaaatctcgtattatatataattagtaaaggcatggtatataaaatgtatataattgaaatattcttttgaaaaataccgattactatttagaatttttatatcatcacaacatttctcacaccagcatatttagacgagtcttatctaataaaattatactctcaaattttgtgttatcacatattttaaagatttatgaaaacaatttgaagttctgttacattataagactaaattcaattatggagtcgatgtttcaagatgttattcataagaattgaagaatgaataaacatggaacccaaatgaaacttctcaaatgttattaatatcttcttctttttttaattattattattacatgtaacgtaagctaaaatttaaaaaaaataagttgaaaaagttatctattttaaaaataagttaaaacactattttggtatgggaggagttgcaccggcaactcttgaacattgttcctttagcatcgaaggaaaaaacggaattaatggaattttcggtatgcaattatcggcgtccacaaatgcttcgcaacaagccggacctaaattaccgaactttcgagtgaaaatggattgagaaatctctgcaatgcatccaggaatatccatcacggatgagaaacattttgttatatcaggtaatacaggaatcagttggaacagaaacggaaaaggaagttgagccggaaactgaggcaattgagcatttacagaaactatgatacatagaaccgctagaagtgaaaacacatttttgatagacataatgaaaaattgagtaaaaagtcttagtatagcaactatatgcttaatgctttgtttgtttttgagtgatgaataacaataaaaattcttgcttatttatatggattgaaatgtgaaactgtcatattaattattttaatttaacatctttgaatattttaattaggtatttgattagccgttttataaatttaataaagttgaaactccatgtgtgaaacacgtaacattaactaagaaatattgactacaaagagaaaataaaagtaaaacggcttcacataattaatcaatcatcggtttatatttctaaatttaaacaaataaatcgatttataatattttcttcgtaaaattatttgaatcctaaaggtttggtttgtaaaacttctatacaatgagggtctccatgacttgttaacactaaatttaaaccagagaagttttgagatagcggattaaccggttggacagagcagttgagatcaggcttgaaaacattgaacataatctaatatatgtgccaaatatttatatctacatatacgtttttgcagccattttgtcaaataaatcatggagttggaaataatttacaatggctgccattggcatttattatttagtgttacaaaatttaaaaagatattaaccaaacaatatctttcctaatttatttctaaaaatctctacacaatctttccgtatatcttcaaaaatacaattccgtgaattttacaccataaaatatgcataaacccaatttatagaaaatatttatattaacattttgcatagcaataaaaatactaatttataataatgaaaatattcacataaaaaatcatataaacatacagaaaaaactatatatatcattatttaagccattgctttatttaaataaaaaaaaacataaaaacttgaaatcatatactttatatgataaatttaaaatctatattagtagtagaaatttaaaatcattcaagaaacggtataacacgggtgagatcttaaaattattgtatttataacaataataatttattttctttgattttataatactaatatttagctaacgagataatatagacaggtttatataggatgacaggttttgatcgatattaatgaagaaaggtatatcaagaatgaaatcttaaaatttacaattaaaatacaattgtacaatcttaaacacaaaaaaccatacaattttaacaaaacgaatataacttgaaatttaaattttttagctataaaaaatagactcacggtatactgcggataaaatattcaaaattttaaaatccacgatacatcgttacttaaaaaatatgtgttttcgtacctatacttcaaaaattgaaacctaaacaatagtaatcatatactaaataatacagagattgatatctacatttgaaaatacaaattaatatatatcttcagttagtctttttaaaaaataacattatatttttgttaaaaatatagcctcgcggtgtaccgcgggttaaactctaataaagttgatttttcaaaattgttaactcacatgatcatgagacgtgccaaatttatgattgttacacatatcaaatcaaattttgttataaaaccctctaacttatctatttttgcatctttattatcgacctccaacaaatgcataataatccaatgaattctaaaataatactcactgtaaccctttttgttcattttttgctaccaaaacattttgtaaatgcattacattatgcgtcgagaatatatcatatatattgggaatgcattacattatgcgtcatgattatgattttgagaacgagagtaggaaaaaatgggacatggaacgggaactacgccgactcctaaatatttttatttcactcaagcgggtttaatgatttttcgactgttttaatccaatttgatagctcacaagtttaatagaaatttaacgaggaccaatccggttgagttggaacacggtccgaccgctggatcattcctaattttaataaaaatgaaccattattatttgaactagattttaacccgcgatacaccgggaacaatttgttttttaaagttattatatataaaagtttacaaattgtatttatctataaaatattttattttatagtttacaaatgttattaagtaacgtcctgccaaacccgtcccgtaaaaaaaacatttattttattaacgttgatcttatttatgatatgtttataaatcattgtctatagattttgtaattttgtagtaattaaatgctatcaaattatatctctgcgctttgatgattataattgaattgttatagtcatggagaaaagcaatatcaaaaatgataattttgtagtaattaaatgatactccctctgtttctaaatatttgtagtttaaggtttttacacacaaattaagaaaacatacaaatttcatttaatttatctatttcctataaatgcatcattaattacaactaatccaaccaataaaaaaatatgagataaaatataattgattaaaaactattaaatacatttaatttttgtatagaaaagtgaaaataacacttatattgaaaaaaataaaaaacctttaaactacacttaattagaaacatagggagtattaaatattttggaagttttattttagtaaataatcgtgtagttaatgtggagagattttgggaagattgttaaatgtcaaatatttaattcgaagattttctttctaattatcaaaaacaaacattaaatttcaatggcagccattgtaaataaatctcgattacaggatttatttcacaaaatgactgcaaaaatgtatatatagtaatgctagtaaaccagaatgaaaccaaaccaaaaacaaaactaaatatccaactggtatgaattcatgttataaatatatatcaaataatttatttataacctacgatgttataaacaggggcggacccacattatagtttgtaggggcagttaccaccagtaatatataactaattaaagtttttagcttaaacaatatagttaaagtagcaaaatggtagagattgcctccactaagtgctgaagatagcaggttcgattcccatttatttacattttgcacccacttaatttcttggcggatattttaacttttaaactcatgtaacatcttccggaataaaattcttgattctactattttccaactaatctacacacaaagtcaattacattaatcacctcgtgctatagcaaggtttagtacctagataaaagttaaaaatgtaaaattagaaacgaagatgtaaataagtaatatctaaggtaacaaatttagatatttggaagttttctgtttttggttttatatacaaacaagatatacgtgctaacgtaatgaacaatcaactagaattatccctaactgggagaagtttaatactttcttgtgtactaccaatttttttttcctttttttttttgaaattcaggaggttctgggtcgaagctcgtaatctccccaggcccgaaaccacatcatgtattattagtttcgtcccaagcatcactcgaaccggcgacctctaagcttcgcctagggtctttaccaattgagttaacaacacttggtcgtgtaccaccaattactctcttgttcccttaagaaccgtatcaaaacaatggaacgctctcttcaacgacaagacgttcatcaacaaccacaagacaacgtatcgattcatcttaacaaccaaattcaagatttattcggtaagcattcatccgaagatagaaatatatgaattaaccttagatattcctggtttagaatcccagatacctaaaaacatggtagattgattgctacgttgcatggagaaaggagctgtggtttggaacccatgcttgagacagagtggatagatcgagcaagatttacaccaaactcaatggaatcctatggcataggatacaacaataaggggagttacaagatcattgctggttgtcgtctgaaggaacatcccacaaagaccttgtggacaatgcatgactttgcctccaatgcttggaaatacctcaagtcagtatctggtagtgtaatagtcaggaaggaaaaacggctgaattgaagtactcaccacaagttgtgtattatttttgatgacaagactgatcccatgtacacctgccctatataaattcaattcctccagggaattctttttcagattttgtcatctaccatgtggaacgatagactatcgtaaggatgctcttgtactcagggtttatgagggggatcaattttcattgttaaatcaatgccatgcaacaaagaagattgaggtctgggtgagcaagtacaagattaataataattgggttgcctgaatttttaaccctatactagttggagtctcaactttccaccataaacttttaaccacttgaaaaaccagcataaacaattttaatctcgataaaactacatgtactttcggatttgttcttaaaactacgtctccaattgaacagaccagttaaccgataattatacatccggtttgacttacccataatttaaccgaaattaatccgattttgactctattttagcctaattttgacccaaacaaaatgtaaataaattatcttattaagaagtaaaattatttttattaatttttatttgtgataaacaattaaaaatattaaattataacttaattttagcaaaaattattatgacaaaatataccccaaattatattttgagctacattttgttataaaattttgataatatacaaacatatacattttccttttggcaatcatttatattttttataaatataaagctatgtctttattttaaacaaaatattcattttcttgaaatcataatatttgacctttgaactttatatatgtaatgaaattcaaaatatatgccaaatttatttttatatatatccgtaaacaccataatcaaagtatatattatggtatttataaattcatttttctttatagattcagttttctttttatatatttcaagatgagttatatatgtatatatatatatatatatatttatatatgattatggtgttttaaaaaagaaaatgacctttgaattattaaatttagagtatataccatatacatttatatatatatatataacaccattgtatttataaaaggaatttattgtctattttgttatattgttttgcggtatattttgtttattaccaaaatatatactaaaattttattatataattttgtgtggtatttttttatttttttattttggtaaaattaatttattttttttaagtttttatcaaaaataaataaaaagtatttttcttctagagaatatattttttgagtctaaattgggttaaaatagagtcgaaatcgaataagttcggttaaattttggttaagtcaaaccggatatataatttttggttaactggtcggttcaattggaggtgtagttttaaaaacaaatctgaaagtacatgtagttttatcgagattaaaattgtttatggtggtttttcaagtggctaaaagtttagggtggaaagttgagactgtcacctaaagttcatgaaactgtcaaatccttacttgccggatttagtagaccgaaaatactctaagccaagttacttcatcgaagataaaagacccgtagtgtgctcttgcgatgaaactggtcgggcttggatctatgttttcagggaaaataagctgaccagtaaaacttagatagataatgtggttgatccttgaccttcgcattctacatttattcccaatttggtacatgttcctcaaggttaaagagaagaactagcagagttaaaactttaattttcttacatttgggcttcttgtttagttgttgagggagctaagtttgatttggattttgcattttggtgctttattcacaaactatcctctttgttggaactagagattgtttttggtaatttttgttttttttgcaacataaattatttattgtttctagaacaaactagagagaattgcattcactctcgtggtcttggctttgttccgataataaaaatatgttagacttcacttgttgttgggtcaaatatgactaagctttggtgatagttttaatttacctagcttgtgtacagaatttaaatacatgatggtatgaagatcaataagtagcaataaatggaaattttctctttttcctagtgaataaatgtaagagttccatattttatactagttaatacttactaaaatgtaaaatttacaaatttcacggatgttttatatgtatgtaaatttttgtgttgataaatgacgatatactatatataaatatatgcccaatggttgaccaagggtttattaatgcttctacaccaagaggtcggggttcgagtctcagctactgcgatttattagcagatttgcagattaatggaggcaagtgtgcaaaagatctacaacgatgtacaattatagccgttcacctaggattctacgcagagaagatattgaaggtgtccatcaagcgcatggagaaggagaatgatgtgtcgtctgccatagatctaataagggtcggaaggaattatccgtggtagaatcgtctatgtaacaattctcataatttgtaataaataataaatctagacggtaaaaaaaaccagaaaaaaaagacgggagaaagaaaacatttgtctgtgtgcaatatgaaatgtatttgaacatttccctcttttaacttggtatatacatattgaaaactcggtactcttgtagccttgccattttcaaatataatagttgcttctgactcagaagttctgagtaatctggacaagtagggaagaagaaacaagcagaagttaccatgccatggagaggaattgagcttcaaaaggttaaccaagagccatgaacgattaagtgttttattgtaaaaagatgaaaaattagttcttatctttaaaacatgcaaaatttagcttgtcattccattgtattcctccaaacacaattacatagcctttagacgatcaattagagccttgtgcatcatatggtcctcattaggaacaacataaaaaaactaaactaaataattaaatcgaaccaaaattcatcaatttaaaactgaattgagtaaactggtttaagaaaaacggcatttttgattgatcaagagagttgatttaggatttagactacatgatctcgatgtaaagggtgcaaactaaacaaaatgatgtcagaatctagcaaaattttacatggtgatttgtggcaaaaatctcgcgaattagttaaatatttaaatcgtaacagagaaatcttcctaacaaattgattaatatttttgtctagttgaataacctccaaaaggaaaaataccgtttgagatagtttaatttagtttcaacgaatacatattagatcttagacaaaacgatctaccggatcaggtaatttaagttggttaaaattgtccaaaaattctctaatgccagacttgatctagtcccaattagtaagaaaatgagtactgaatataaaaaaacaaaaacctcatctggtgatagaaatcgagtgtaacatcatattttttcttacccatttcatcaaaattccacataaaacaggtttgccatttacttattacaccaaaacaaaaaactggttgagagtagaaacaaacttgacttgggacgaaaatactcttaaaagtcaaaacacaaagattcgaaaccaaaacaaaccaaaccaaaccaaactgataaaatcctaactaaaaaaaagcatttactaaacattttaaaataaataaaatttcccggaactaaaaatggagggaaatacgacgttacaataccaacaacaataaaatgacgaatttacccctaaacacaattatatctccattattttctcgattcgcgcatgtttctctcaagtaaataaaataaaaatcccaacaacaaaacattaaaaaccctttctctcttcccactttcacatccatagctaaacccttgaagaagattgtttagtgtgttctcgtctcttcgtttatttcttctccaccgatccaacaatgctactctccggtcaatctccgactctgattcgttaatctccctccgtctctctcgtctgattccttccgtatctctctctgattttggccagagcacgcttgataatcaaaatttctccggtacggttatgtaatccgtttcctgattagggttttgaatttcgtcttcgtattgtttctcgatctgttatgatcgtacgtttttcgtttattgttcgtcagttattttttaattttgattttgattcgttgtgaaattttgactgtaggggtctttatatgactgagatttgagaacattgtgtagaaaagtaaagaaatgttagaaactaacgagcaaaagggttttgatttaaacgtgtgtgcttcaattgaagatttcagtgagtctgacattaaggctgagggtgaaactgatagtttggttgatggtaatgtggagaatgtgattgagattaaggataagaaaaaagtgattgagcgtgagattctcattacgcgtagggttcttcgctcaggctctgtggcaagggatttagtaaacagtgataaacattgtaaggctgtgaaaaggaaaggaaatgttgttagtggtggaagttctgttgatgaggtgaaagaagaagtgaaacaggagtgtgttaagtctttggtacctgaggagattcgtggagatgattttcgaagtgaagtgaaagtggaatctaaggatgatagatcagatgatggaaaagaagagaaagttcaacgtaaaagaggaaggcctcgaaagtttgggatgagcagtcaatctgatgataatgggttaatctcaaattgtaaacttcggacatctttaggtaagaagaaagaactggtaggcgatgataatgttgagaaacttgttggtggaagctgctttaacaaggagaaagcagaagtaaaacttgagcatggggaatatgctgaagataaagagattcttggacttgattttaggagtcaggttaaggttgaaatcaaggatgatgaatgtgggattgttgagctacatgatgaagagttgcaagttaaacgtaaacggggaaggcctagaaaggtgcagatcagcagtcaatctgatgagagtcgccctaacacaaactgtaaacttgcgagaactccagaactaagtagccagtcgagtgttgacagaattagtttgagtcgtctgcgtggtagacccccaaagaccaaggagacctcggttagcctttacattgaaaaaggacctgagtctaatggaaggaggatggtacgtaagcgtggaagacctccaacaccacagaaaaagaggaaatcggggatgacagatgaatcagattggaaagcaaagaagagactgaaactttgtgagagtccgttagagtcacggcacaacaatcctttaattgatgacgaaaggatgattggcgaacaacggagtaagcaaactgaagctggaggacattcgagatcaaagtctaagaaaatgctgagtgacagaatactgcagttacttctaactgctggttggactgttgaatataggcctcgaaatgggagagcttatcaagatgctgtgtatcttaatccagagggaaagactcactggtcagtgactaaggcttatcaagtttataaaaaacaattggaaagcaacccgaatgatcaaaagaactctaccactggttctggttttggcttgctaccagaagaagaccttcatctattagagagaacaattcagaaaaaaaggagcgatacaggtaagcaaaggtcaaaattgaaggacagagatactaatgacatcttggtttcaacaaagggaacaggaaaaataaagagggaagaaaaacatagtagaaagcgttgtactccgtcagctcgtagttctttgaaagatgtggattccaaggaggatgggtacatattatttgaagggaaacgcaccatgctgggttggatgattgattcaaccattgtgccacttaacggaaaagttcagtgcatggactgcaagaagacagacatacttctagaaggaattatcacaaaagagggtattcgatgcaactgctgtgatgaagtgttctctgttctcgatttcgaggttcatgctggcgggaatcgcaaccagccattcaaaagtctgtatttagagggtgggaattctctcttgcagtgcctccatgagtctatgaataaacaaagtgaatcacaacttaaagggtaccattttgtggactttggttcgggggatccaaatgatgacacatgtggtatttgtggggatgggggagatcttatctgctgtgatgggtgcccatcaacattccatcagagctgcttggacataaaagtaagttgctccttacgttgtgaaaattttatgttaaagtgggcttttctgtttcttctagacttaatttctcttcaatctgcagaaattcccttctggtgcctggtattgttacaactgctcatgcaaattttgcgagaaagatgaggctgctaaacatgagacttcaactctaccctccttatcgagttgccgcctatgtgaagagaaatgtatgaactatacactaaagccatcttatctgtaattgcatttatatgtatatgctctgttaaacttcttcaaacggacttctaggctctaagcattaccctcacactcttgcagatcaccaagcatgcatcaaccaagatggcacggtgcctggtgaaaggagtactgattcattttgtggaaagtattgtcaagaggtagccttcctttttcttttttaccttttatcctggcgctttattacttgaaacgctgagtatttcatttgtttcttcccttctttttctttaatttatagttattcgaggaacttcagttattcattggagtaaaacacccactgcctgagggattttcatggtcattccttcgccgctttgagctccctagtgaggttgccgattgtgacatatctgagaagattgcatataatgccaaaatggctgttgcattttctgttatggatgagtgcttttcacctttggttgatcacaggagtggagtcaacctgcttcaaaacattgtttataattttgggtaagctcattcccaaaacctgtccttatatgcttctgttttgttcaattggtttattggcaagtgttttatggatatgtaaacagtccgtatgttactacttactagattatgtttaaactttttcctatttttttgtaggtcgaacttccatcggctagatttcagcagttttctcactgctgttttggagaggggtgatgaaatcattgctgtggcgtctattaggtatgcctttggtaccatgaaaatgagaacaaggggtaataagtttctagacttatcatactagacttaaaagcattacttagatgtgacattacactgttcgtatcatactagtggactagtggggcaaacaagattagaaaaccactttgtacccctttcattatactatttcttttgttaaggtacagagatcttaagtttgatagaacacactacatttagatgttagcagtttatgtcgtactaagataaagaaattccctaagtatatgcctctacatggtctcaggtgtttgattgaaactctgttgccgggttctcgataaattgagaatactaactgtgtatagaaattagcttttcttcccataggactgatatatctcttactcaggatacacggcaatcaactggcagaaatgccgtttatcggaacccgctatatgtacaggcgtcaagggatgtgtcgtcgactaatggatggcattgaatctgtaggccctcctccacttcttgtcatatcctaaattcctttttctgttagtttggtggttatttacattaaagttcgtcgcttatttctctcaaatgtttcttgctatatctgaagttttattagatgtctggcaattctgctgctatcctgcttgttttggcgacgggccattctgctttttctcaggttctttcaggcattaagaaagaaatatggaaatagctttgcatttccatgtctgatatatgctaaatgacaaaatgattgctagatcacactgaactaaaaacatggatttgtgtagtcatttgatttcaaatatgtataagtgactttataggatagttgatgcgaactagtcaagcttcttagtatgccatatgtcttgatctgctgtgtactatctcagtcttctgttttgtttagtttagacttcattctgtgtacgatttctgaagatccatattacaaatgtgctttatcatcaggcgcttggttctctcaaagtagacaagttagtcataccagcagtgccagaactgattgatacatgacttcaggctttggcttcgcacctgtcaatgattctgagaaaaaaacaattaagaatctgaacttgttggtgttccctggcgtagacatgttggggaaatcattggtgaaggagaagatcactgactcagttgtttcatctcccaatggtactaactcagtttctcttggcatctgaactttttaaaatgttcatgttatgtgtacatgcatacttgcatctattgactgacttaaatctactccaggtttagtgctgttggcacctgagatgactttgcctgtagatgtcgaggaaaataaacctgaggagtctaaagacagtgcacacgagcgaaattgtgcaactgctggtgttgaatccccttctaacccagttgatagctgcttgaagttaacttatgtagaagagggggataatgacagagaatccaatctcaagttacttgacgggtccgtggaagagaaagaagacactaagaaattgacagatatagacatcaattctcttcctgatgaagttgatgattcccatgcggatcaaagtgatacaaaagagcaggaaattgatgataaagaagataagacaccgttatctgatgatggctgtgaaggtaaagctgagggtaccaaggagtcaaatcaacaaccggatagtaacaaagtagataactctcagccacttggtaatggtggtacaggggaagagcttggcaacagaaccttagcgctaaagagagaagtgactcccacattgcgagcatcgccccgactgattcaaagatcgtggagaacatcacgggtgaaccagaagttcacaggtactactaacgccgtactgcttgactctccacaccggtgtgtctgaggctcattgcatagacagagcttttgtggttttgtgcatatgaccagtctaacacattttgtctaaagatggagcagccctttgctatttcggggtgacaaccggaaaggcgcagttgaaagaaaaagtagttagaattctaatttcagtactttagtaatttcattagtaacacatcgagccagaggtcagaaaccttgcagtggctcaatgcttattagacttaattgtgtagtaaacaatttctttcagctgtatttgagctgcttcataatatcatctaatgttaaaacatcttctggcttaatattcaattaacttattattagataccataaaaccaacaattagcaaacgaagataactttaatagtttaatcaccgcatttaatacctccaggaccaccataagacatagcaataccaacctgatgatcaacatatcctactaaattaacatcatagcatacgttgctgtccaccaaaggctctgtcatagggtaattaaatccggcatgttcatagtccggttggattatggtaagatggtcaagataaccagaccatagacggtcatctttgtttggaagacgaccattacccatcggtgggcttggagttcttggatcacctgaaaccattcctccaaatccaacgaaatcagcaccatctcctagaagattaaacaactcctttggccaatatcccaaatgatttttagtatcatcatctggatttgtttgtgtaagccaccagttttttgtttccttgtccttttacatgaattagcagttgcaaaaataattacaaagtattcgtctaatagtattgtcaagcataattcattgttttcaattgttgattccaaattatgctcttagtctatgctctatcttcatatgtataagaaaaaaacttatgatttggtataagaaattctgtacctgatgtatagtaagccagagaagataatcaaacttgagaggtacacttattggaccatttttggctacttgaacaaatcctggacattttacattaaaacagcctgttccatgtttcccctaaaattatataacatgaaaacatcaaaattacataagatatgcacttgattaggagaaataattcataaaaataaatcataactggttttaccagccatgtcccatacgaccatggtcgtttgtcgccaaatagttgttcattgatctgtaaatgatagtaagaaatttatgatttaccacaaagatttaattaggaaaacaatatagaagatgaaaatatgtattaccatccatccaacttgaatagaattggcatcaccactgaatgctctggctacataagcttgagcacttgtactttgatttttatcaattatcaagttataagtccttagccctgcttctacgcctctgtaattatgtttttctactactttcattcccgcaatctgtaaatgtgtcaattcaagttcaactaacatatatgcaaattactttttacatgtgtaaatgtttttgctctgtcttaatatataaatttcaatgcattttgctaatattcaaccatgtgaaaattttcttatgataggtgtttcatatttaacatatacgatttcatttaatgctgaatttaataaatttttgtagttatctatgttcattcttaccattttaaaaataatgagcaaattttgagagttaacgaatcagtttaagttttgaaacagaaaatttacaatttaaactttttaaagtatgaaagagatttttaaaattaataatatatattgtattttatttttgggtttttgcaaatcatacaaatgccaaagtatgcaagagattttcaaaattaataatttctattttatttaatgtaatattaatatatcacaatgaaaaatatagaatagtatacttacatgggtacccggatatttagctgtaagaacggtaaaattattgatggggtattcttgatattgtatgacatgtttttccttggctcttaaaataggaacggttccatttggacattctattttattgttgtgtcttctttctgcaaatttattctctgattgagaatcccatcctgttggtttcatctaataggaaaattaaaaaaaaaaaaaaaaacacatgtaagtgttaaagtataatgttcacttaacatactatcttaattgacgtacggtatatgatgccagtttttatttctggatatgtttatctattgaaatatagaatggttaacaagaataatgaacattttgaccgactcttaaaaaaatcaaaacatgtcttagagatttgttgaaaaagactttccaacaaacacaacgatcgcaaaagacttcccaataataaaggaagacaaaattccatatagatatatttcatgtcttttaatcaaaaaatagattaaagaaaaatgcaaaacaagatacccgaatattatgatgtttgagcaatggatgactaagagatggttgcttataaatatccatgcagtcgtaaataacatttttacccaactacaagatgaaaaaaaatcacataaagtaaaaataacaacactaaagaagatcacagtattgtatttatgtatttcactttaccttgatggatttcatatgtatagtagattcaacagataacactgaaaggataaacacaacaaaactcacaaagatatccattgaatcacaatgtaatatcttccaatttgtttaaattttttaatgtttcatcagtagtgatattatgttacgatataaataaagatgtaaaatgttgaatgcattaaaatgcaattaatgtttatataattaattataaagcttttatctttcaacctattattaatgaatatctgggagtatttaagagatttctcttgccatttggcaatagttctttttttatcaatataaaagtcatgaggcaaaatcttagcttagtagatgcaagcaaaaaatcataaatataaagttacccttaaatgtatcataattttatgcatccaaaaattaatagtatctcataccaataataatgtgccacaataactaactttattttgaaatagccaaaataactttgctttagaaaactgaaataattaaaaaaaaaacaaagaatgttatgaataatagatggatgcccattataaggctcatcatctagatgtctctagggttttacccttctcttgtactcctatataaaggatgctttattcaatggaataacacactcatttcttttatctctttctctggttataacacgttatcagcacgagtcctacctagctgagtaaaccctagccacctaagaaaacgaaaaaaaaaaaaaaaaaaactagccgcctaaacaaacaaaatcttaagctaacaagataagttttctgttcatatttgtttatgcacgaattatgcacaaattatctatcattagatctgtctgtatttttacacaaattatgaactaattatctattatcagatctgtttgtatctctatacgaattatacacttattatctattatcaattctgtttgtatttttgtacgatttatgcacggattatatgttattgattctgaactgttttatgcattatatcgcagaaaccctatttttgcacgaatgatcagcatctggatttttgcacgaaagataagttctcttccatacttttataaagataaagatctaatgtttctttgaaaattaaactttcatagttgatgcactattagttttacgttaatagagttgaccatgaatattgtttaccctaaatttgcacgaaaaaattatttaaaagatctgtattaatttttttttaatttttttttgagtttaaaagaaaaagaaaaaagactgttcattgttttgccctaattttgcacgaaattattttacccaaattttacacaaattcatattatcctaaataaaagttttgtcaagatatatgtaaaatccagattttgcacaaaatagttttattctgattggttttacaatattgcattaaaattgtatttgtatataatacttgattatttttatgaaataaattgattgataaataacttaatttaaaggtataatcacttatagaaatttttcatgaatgaatagtttaatgtatcttaagaagacatcataattttgatgttcaaagttttttcaagaacttaaattatcaccaaaaattgagaaaataaatatggtaaaaaaataagtaaaatttctaacttttaacgatgaaataatctagtatatcaagtagtttaaaatcttattaaaagactctagaagagcatatacattgttttctatgggaatacaaaattaaaatcatcgatgcggtatagttctccaaatctcaaagttaatatgatgagatataaatacattatgattctagagtggaattcaatacgagatggatgaacttgaagtttcatcatctcgaggaggagaagtaatgaatggataataagtgacatatccagaagattatgttcaatctttgactactaaagatctaaaagttatataaagcaattcttatatgaatgtgttattagataaaataagttataattagttattactaaaacttcaagacttgaagtctctttttgaatataactcacattgttaagagaatatctctgatgcggagatggtaaaacagacgcttaaacttttacgcaagtatcgttgtcctgtagacacaatattttgaaagaaatttaagaactattatgaacttaaatcgagtgtttttcaaaggctaagaaaatatatgagttattgatgataagtaatactcatattctgaagtgaatataagatcttacatagctagtcaaattaaatttaatatcgtttatattagaatataaaatttcaattattgtctcgtttattgctatattaacatatgattgattattaaaatacatggaagtaattttgattataagatcccattaagggagtaactcataagcaatgaaaagtaaatcagaagttttcaaaaaaaaaaacaaactagaaactagaagtttcaagagtatatttggcttaaccggattggtcatcctggtttaatgatgatgcgaaagtattgagaattatgtggacattaggtgaaaaaacagaagattctccctaatgatttatcaattgttacttgctcagaaagcaatatgataatgtgatttttaccagtcaaaataatttggactttatctattcgtaagtatatacaaggagatgattatgggttgatcacccactgtacgacatttagatacctaatggctataaaagatgcatcaattcaatagacgcattgactcgattgttgcatcgactagaaggtcatatttatccttgttataaacccgcaacatagagtttgcgaggttactttcttgattaaagtacaagagtatttcagtgtttatttattataaccattattggatatccgttgggataagtgtttaacattttgaaattcatgttcatacacaaaatggtttagtaatatcgatacgcatcaagccaatgaataattaatagtttttcccataattattggttttgggtaagaaaccaaatagttttcatctaaaatctttgaatgtgaaaagtgttccaccacagcacgctgagataaaccctcaaaggaggataaggatacatgttggatatgaatgataactaagccatcctagaaggatttatataccgctcgttttgaagagtatatagtcagctattccaacataagggggacaatgtatacagctggtgaaaaaaaaaagataaaaagaaatgaattatcaatgatcctcggagtaaataatgtatattaagagtctaaaagataattcaattacagaatttagcgttgtaattgccagacgcatttgctgacccaaataaagtgatgaagtcacctataccagttgtaaattaaatgctccagaatataatgaatgtcctgtaaagaccaatttcaaactgctattgagtcttaagatcgcatgaagcgtaacagaccttggttccaaatataaatatcctcgtaaaagtgaaggagcacaaaattaaaaatgaccaaattgaggaaataaatattttgatgatctcttgaagagagtgaatgatctctaaaagagacataaacatgacaaatgaaacattcaagtacttgacaatgaagagatctagctagctatgtcatgtcaaaatataatggaatcaaaagcaaatcgacgtcgtaatatatttgcatgctatgagtagttgatattatagacaaaaaggaggatcatgaaagaaagtctattgaaaagtgtacacaaagtagtgattagccaaaaatggaaaagaagaaatagacatataattataatctctagtagagatatttggactagtagtctatgcacatgatgtgtaaaaccagtggaagataaatgagtctttatgtgaaagaatagtgaaattaatgagattttcagaaagatacgaaatgtattatgaagagatatattctcttgtggtggatgtaatatttttaagtatctaaagtctggcaataagacacggaacactggatatcacatttatatgaaattcttgaaagatataatctctgaaggattaattatatgagaattatgttctctagaactctactcgatcgaataaaaagaaatatgtaacatgacatataatcctataaatgtctatttatgttgagtttgtcaaaatatattgatcaaactaatatttgttttgaaaatcattaaaactcctagagagttatcataagtaatacgatgacaataatctatgataaaatatcactagataatgatatttataagtctatatgaaaaccatataattttgatcattaagattatggttattaattccaacgagatattgtatttgattgaaaatcatctcttgaagaagatgtttctgagggggagattgaatgatatgcgtggatgtaccctttttccttatcatagtttttatcccacatgatttttctatgacaaggtttttaacgagacattaaagaacacgcaaataatacacttgatgaatattaggaaattctatcaatcatccaaatgaatattatacactaatgatatttagagaaataaattagatggtcaagatgaataatctaaaagattcatgagcagcagaagaatggcgttgtactttatccagaaatttgttcaagagaagatttggcagacttattctcaaatactgtttattctctgccacatcttctaatcatgcagagattttatcaattcatgaagctagccgcgaatgtgtatagctaagatccatagttcaccatatacaagaagactgtggtatgtatgcagggaaaaagactccaacaattatgtacgaagataatgcatcatgcatcgcacaactcaaagacggatacatcaaaggtgatagaacaaagcacatcctaccaaaattcttcttcacacacgatctacaaaagagcggcgatgtacaagttctacagatccgttcgaatgataatctggctgacttattcaccaaagcgctacctactgctacttattcatcgtatcggattacgccgtctcaaagatctcgatgaatatactcataagggggagtaattgtgtgttgcactctttttcccttaaccatatggtttttcccattgggttttcctgttaaggtttttaatgaggcaacattttaaatactttacgagttatgatactataatggtcatcaagggggagtgttatgaataatagatggatgcccattataaggccaatcatctagatgtctctagggttttacccttctcttgtactcctatataaatgatgttttattcaatggaataacacactcatttcttctatctctttctcttgttataacaaaaaaaaagttatctatatattttttaaaaatgggtaaacaaacttattttacaatcattcaagtaaaaaaatttgggatttatttcgttttttttttagattgattatgatctctagggaattaagctatgcaaatttgtaagttttattaagaatattacttttcttgtggatttattcgtttaaacatcaaagaagaatgaaatcataccctcaaattacaagtttcaaagtttgtggagatttatgtaacttatccaataatgtttgttttcaatttttgaagaaaaagttcaaaatgaaaatttcctacgggcttgacacacataaaccacagactcgccaaatttctagtagacttcacatatatgcggagtaacttaaaaactttctagaaacatgaggaggtcaagaagattatcgtaagccgggaggaagagtgacgagagtagaaacaaaagagcattggtgaatattctgaaattcctcaaggaagttcatataaagacaacatggagtctctatggactcttagaaaagctcctactaacaattaggatgtttctccttttaatttttttcgcaacactccctaaagagacagaaacatattaactaacatcgatctaaggttatgaaactaaaagctaactttgaaaatccagaagcagctctatctttccaattaggcagagtcaaaacctttctaatgtctctctttcatttccaagttttaccttagaagtaaaaccacaaggacgagcgagaccgcaagtgcagcagaagaaagtccccaaacccaatatcgacgagcctttctacggtttaggatggccttagggagagcttcggttccgcttccgcggtgtttgtacctaaaacttctctgctttggaaacaacaatctctccttttggtgtttctctttccctgaaactgctaatgtcctaaccttttcatcattgattacttggtctgattctgaaggagaagtagaatttgcagcagctttcttcttcgcctttttctcacactcctgaaaaccaaacaaagaaataagaaacaaactaatgatacattgaaaaaatgggaacaagataatataattgccttgagtttcttttcagcttccttttgagctcttatagcagctttagcagcagctttctcttgcagcttcctcttcctttccatcactaaccgagctttctctaactgctcttctcttttcctctccttcaaagcttcttcatcgatctcttcttctttcttctttggtttctcatacactataacatcactcttcgtttctttctttcgtttatctgtaattacatttccatcttcagaagagttagagcttgaatcttctctattcatcttatgaaccttctcgcttcgctttatagtcttaaccggcactttcttttcccaaaaaatctgaaggtcagcatcttttatccggccatcttcgttcagttctctttcacatagtgaatgcgagattcttcttacgtaatcttccctaaaagccttatcatcattccaaagagtcatgaatctatcaacctataaaaagacagaaccaagaacaaatgctcaaatctctctctatcaatgtttcgtttagaccaaacaaacaaactaacctcagagctagcaaacacttcaagctctctaacatttccagaagcagccaattctttagctttacacataacagaaaggctctggaaaaatgcagcattctacacaaacacgagaagcatataccgaaatgttattagatctttaagatcacccacaagcaaaaattaacagaaagacaaatatcttactcctttgtctcgttgtatcctcaacatcttaatccttgcataaaatctatccctcttctcaagtatgtgtgccttttccaaatccaaaaccctaatgttgttttgactcttccacaatttgtcacttaggtcgtttatcttccaagtaatcgcatcaagctcattctttacttcattcaattccaaagccatagactaatgatgaggcaaaagaaccatcacaacattagattcaacaatgttttagcaaatcacacaaagagttagagtttaccttgacacgatttatggaagcttctttctcacttagaatgatcccatcaggcttctcagtctccttaagcatccaatcttcttcctccaaaccaatgctaccatattcaatctgatactgagctatataactctgcatccaccacaccaaaacacttctacagtcaaaaacctaaccgaattttaacgaatggttagataaaacagttgtattacaagatgatcaagttcctcctttgtaaaacaaagttgatcactagtagtgcaccggagattccgtagagcttcaagtagagtatcaaactccttcttcttctcttcaataaccattctatatccttcagattgaggaaccaaactctccatttgagtatacaaagacgaaacctcagccagttcggatttcttggcgctcaagacattgattcggagttcattacaacgaaaaatctcctgattagcttcatcgatcttggctttaatctcgggattatcgtaaacaggttgcttaacaatgtagaaagagagaggtttatctccagacgaatcctcttcagctgcaagtcccgatgaactatcaccaccggaaaaaatagtgtcttcttcttcgtcggtggtgacctcgctatttgtcaaagattggtcgcattcgtaaagaattagatcgtttatctcgggcgaaggaaccacctcgaagccatcacagaatataatctgctcatccattttgattatttcccttgagtcaagaacaagacatgtcaaaatgaaactgaggtcaagacagaaacttaagtctactaaaaagtgcaaaagaaataaacaagagatgtgttcccaataggccaatatactacaagaaaataaaaaatggtagggatttaatggaaaaaaaactggtggagatttttgtagaaaaatggaaaaaaggttttgaccaaatttataccaaaatatccttataaaaaagtattttataccaaaagaagtttttgaccaaccttttattaaattatttatatgtttagtatttaatattttatatctaaaattaaattcgaaatttaatttaattttctcttttaacatttcgaaatattattattatttattaaaaaaataccaaattttatttatttattaaaaacaaaaatgatttttaattaaagaaaaagaaaacggagaaacattttgctctccgccaccaccgtctccggcaccttcttctttatctgcgtttacttctttgaagatttaccttttgagcatcggcgagtgatgacggaggaaggtgacgaaaatgagaagaaggagaggaaaataaagatttacctttgagagtgtgttgataccaagcaaagaaaaatccttggctgtcgaaagaaactactggtggcttggagagaagatcttcagtactaaatggtgagaactaaaaaatgcaaataggctgtgagaggttttgatgatgtcgaggacatcaagaggaaaaaggaaatcaaattacgattttacaccctttattataggaaaaatcctagaatcatattaagggtaatgtagattttcttgtattaataatcctctcttttttatattctttctttttatccaaatttgttatgttgtggaccttttcctattctttaaattttaatgatttctaagttttgacaaaatactaattattttgcattaagctaatatattcattgataaaaaaaaaatctttcatgtttaatgacaacaaaactacaaaagtccgtgatgtttaatgacaaagggaaaaaaatgagaatatgtacaaaatagtcaaagttttgaggataattaacgaactaaccatatcctacagtaacttgtcggaaaacacgtgtaattacgtaaatattttttggaacacgttttttctaaaattacatttgataacaaaatatctagtattacacgtgtgatctttttatcatgctattttttcgtattacacgttatttataaaaaacacatgatattccttaaaaaaaacattttatttaatttaataactctctttcatatattattttctagtactacatgtctttttttattaagatcacacgtgattttttttttaaaagattcttatttcttagtaataaaagaattatattaaaatctattcatattaaacatttccataacaatgtgatatcatttcatttaaaaagctattattttaaataccaacatatgttttcgcaacacactatattttttgaatatcatgctattgttttattcgacaaaataatttttcaaacaaatatagttttgtaattaccataacttagaaggatatagtttgatatttatttcactcccacaccaccataaaaagagttagtttgcaaagaaaactagcatatagttattttcttaattttgtgtagaatatgattatttttaatattacccaaaaaaaaatatgtccttaagcttaggatagtcaaagtcaactcctgtttatataagttgactattaacttatctgaatttgacttgttaattagtaaaatcctctctttttttcttgcatgaattcatatgtaataataacaatacttatagaagattttggcaagaaaaagaagaaataaaatctaattatctgactagataaaccttatttcttttattcaatagataaattactgaagttattgatcctaaatgctgaaagagcatggccattgacccattacttgacataatttgagatagttctgaaaaacaaaatgtctaactcactaacatgtttagatttctttacccatattgttttctaaaatccatttgtggaacaaattttaatcaatcaatatatttaattttcgtcgtataccaaaattagtatgcgttgtattagtgttgtcgttatgtcaatctatatatttaaaattctatatcactctttttaataatataaaaattcagtgaaatgagttttcaaatgcaacaattattgctttaaactagtttttttttatctttgaaattttttcaagctacattttgacgctaaatataacgttaataataaaaacaaatctctattgatggtttacagggcaatatttaaattttgggtgcagtattaattgccaaaagagatgtttattaaagtaattagctatgttagaggactaccccaaaacaaaatgtgttctagcatttctttatttttgctatcaaaaagtgttctagcatttaattatcggttacactatttcttactaatggacaaatatatacgttacattaaaaagttatgcaacggacaaacacacaaattatatgtcaactagttttattgcttgttcaattcaaagctgttaattatcgaataacttagttttcttttaataaaatgtaggatataatcacaaaacattttagatagctttcataatatatacgtatttgtttttaaattacttgaccatttgttacaccaatgtttatcacaatatcaccaaaatttcgacaaaccttaaaacgttatacatatgaaagtttttttctgtcaatgtaatcaaacaactgattatgaaaacatcggctctttaaactaaaataaaaataaatagtagatcacttaaagtattttctattgaaaattttatgttgaaagaaaatacgaaattattttaaaatttcagttcttattattgtatattagaatgttttcaatgctgaaaataaaatatcttgtttaaaataaatttacatgtcatgagttatatcgaaagtatatttcgaaaaagacaaaaccgtagcttcatatcttatcagatagatggtgtgtagttcgccgacatcacgacatgtacgattaaatggaaaacatctattatctgaatcggtctaatttatgagagtcggacaaagtcgatttttcactgtaaaaattataaaataaacacttttttataaaaatgacacatctatcttttgaatatagaacatacagtactttttgttaaggaccaatctaacattcaaagcctccgtttacgtatacctataatgatgtcacctgcatgtctgtatttttttcctctcataaatattagaattttcttgaaattgtaaatataaataaaatttatcatcattatgagttaagttcttaattttttttgtgcttgacatcatctatcttcattcactaaattttgtatcttattttttatttttatttttatgtaatgaatgtttaaattttatccatcaaaaaaaccgttgttataacagatttgtcatatccatgatgtagaaaaaactgtgaatcatgtactctttacttgttccttgttgcatcagttgtgggcactattaaatatcccatctcctctcctataggtggtttttctaagtccatgttctctaatatccattacctccttagtatgtcgaagttagccggatttccggaggagagtagacgagttgaagaaaaatgaatatgaataacttttctttgaaaggtttctttttcaggcaaacacgattattgcttaagcttttgaggatgtacggttgtagtttgtttactcaggaacacacatgacatgccgcatgcgggtcttgcaccgaggttagataaattttggtctcctcctttgtatcattttctaaagtactggatatgcttggtcaaaacagcacagttctggtgcttcttgggtcttgaggaatgctgctggtgtggtcctatttgtatagtcgccgagcctattttcaggttctctcttctggatgcaaagaaaacgtgctctttggggatgtctcctacgatattgtgaaggttcttcttaagccaaatgactggccggtcttacatgactgacactttgttattataacttttaaatagctgggatgttgtttctgaatctcaggttaataacaacggtgttttcgatattgcatgaactggtggatcttttggttggttgcaaggtttattcgattgcgaaagaatgtttataaattatgttaccgttatttaatgtgttatgcaaggtctttttatgtatacatgaccacaaacaaataatttaaaggcaatgaagagagaaacccttacagattagagcttggttcaattctgtaaactcttcctaaaaaaaaacacattggctccctaatttgctatgcacacaaaggcactgcaaataaaataagcttgccaaaaacaagcaagaaagttcttattattatacacatagtcacaaagaaaaatgaatagactgtagttgtatacccataaatagattcagtaccctgagttctacagagtgattgacgcggggcttactagattatacagttgcggctttcggagacagaaaatcggagatcttgctggtgtagaaatctggttgtatcttgttctcagggctttccaacatagagattgaagtaacaccttcaagtccacaaaaacaaaatgaataaaatgttgactgacatagatggttataaaccgagttagtgtcgatagaggaaccgtttacagattagttatacccgagaggacgagtagagtcttacaaccgccattctgcccgaataaaatgtcagtgtccaatctatcaccaaccatgcatatctgtgacttttggattccaaatctgcacatttttttagcagccaagtaccatgatcagtggtcaacacctcattaaacagaatgacaaaaaaaggagtagaaagaaggaatatgagaatctgcaagtcttacttgtctgctaaatagtccatcataaaagttgagggttttccaacaacaagaggctcacgttgagtggatccaacaagagcaccaaccatagagccaccacctgagaccgcgtaatcacatcttaattggtcaaggatgaaaaatatggtgaacatagacaacaaaataacggtccatgaccaaacttacttaggcactacttttttttttttttatcctagccttttctcttataggagaggaataaaatccaaatgctcaaactaaagctaaatgaaaacagttttaaaaatgcacataagaagccaacctgcccattcttgagcatcagtaaggtgagtgacagcatctcggtttgtagcgatgaaaagacaccccgggttttcacggatacagagtgttccataccttccattaaaaagaagctgttagatcaccaaacgcagaacaaaaacatctataacgtatagctcaaccataaactatcaagaatatcattcctgaagtgtggaaggaaacaaataattggagagacctactgaattttgtagtagttgaaatagcgatcaaatccaaccacaacagctccaacctgcaaagcattttcagtataactatgctcagtttcagtctcaagaacaacaatttcatgttttctatagaaggtataagaaggatgtcatacatcatgatcatgctccattagaaaacctggcttcaattcaatctgtcttttaccatcatcctgtatttgaagaaagatcacagagaacataaccaagaccgggaagttaagtatcagcccaaacacaaatccgggatgctactaagaaaggtcacaatacataccggacctccaaggtattgaaaaccagcaagctctagctctttcaagataccttcctcaccaatcacatagacctaaacaaatatgcatcagaacttgcaaagacataaagagatactcttgatatgacattgtaccaccaaaaactgaatcttgagcattttgaatgaagtttaccttcttatcttttgggaaattaatagactgcaagtatgcagcagcagcaaaagatgaagcaaatatctcctcctgtgaaaaaaaatgataactataatcaaaaacaggcttagtagcacctagagtagctagattgtgaattaagtcactaaacctcgttaacattcaggccaagagtctcgaacttttttccatactgtttcctagattttgttgagttgtttgtcacaaaaaccaatctctttccctgaaaaaaaatcagtaataccaagaacaacaattgatgtaatggaagaaacattcaaaaagaatttgacgcataaccatttcacactttaaaataaattgaacaagagattcgcttaccaaccttggcacgaagcatatcaagagtttcaggaactccctctatcaatttatctcccttccaaatcacaccttcaaacacacaagaataaagaagaaagcaaagagaaaattcagcacattttggctattttgacaacctaaactaatccatgagacctatagaaaacagagtatttttgctatttaaggcgtctacaatggccaaaaagagaccacagcaatcttcttattccaaaacttgtaacatatactgttgtaacctctcatttgtagtcaatgcaaatcaacaccacaacgcataatagtgaagaaaaaaaccaaagatctaatcaagaaactccatcattatatcaactcccactatctacacataatctaaactaagtgattatcagatttcattttgtggttttgttgatactgaccatcacaatcgaagataaaagtttcgacagaatcaatgagctgatcagcgttctcaagctgttgtgtggccatagctcttggtgtaatattggaactcgtcattcgaagaggcttatggttgattttacgaatacagccgccacagaaagaagaagaacgataaccggagagggttttcagacagaagataggctttgagtttggtaagagagaagaagatgagaccggtgtaacagcagaagcaactgatctactcagcatttttctctctttttctctgtttccgcttcttttggtattttttttttttaaagaaaaaataaaaaaatttgattctgtttctttaacgtgaatatggatggtgctgacgtggtgaattgggtggatgtggtaaagatatcatcctaatatttcttagccaacaaattggatgaagaattgttggacacacattgtggaaaacaaaaaattattgtacaaacattgaaatgtgacactttatcaggaaaaaaaacattgaaatgtgacatgacttgcactttacaagcaccaaccaaattaggtctggacgtttacttggttacgaaatcggttatatttcgttttggttctttcatttttttagaatttatgatctatgtaaggtacacaaaaaaacttggtttggttcaggtttgggtccggtgcttcggctcacgagtttatgatccatttggatatttttcaggtatttccggtatatataattgtatttcgggtatttttgagtatccaaaatagttaggattggttctagtgggttctttcggttatgaagtttataatttactttttggttccagtttggtacttttggttcgattattttgcccactaaatcaaacacatagaagaagagataagctcaaaggtcaggtgttttgagaacttccattggagtagggtttaggaaaaaactgtactaaattactgggattgtatccatggaatgattttaggttcattgttttacctttgatgtaattaaatttaagtcacacaatttcttactactagatggggtagagagaaactttgttacctcttagctgtagattcattaacattattgcatatattttggtcaaaattcaacaatatacattaaagtgcctaaaaacgatgttgacctttttatgtgtctaaacaaaaattcatataagaaaatacacactaagacgaattatttgtacaccatttaaagtgtgacattaatcacattacaagcaagaaccaacacacacacgtgtaaatgaatagaataaaatgacgaaattggaaattaaatcttgagttgaaatgggtaagaaggccaatccttgagatcttcttcttgcctcctcaccttaaaatcatcatcatctacaacactctcatccaaataatcactatacttcaacaaaaacgctaacacaagaacaatccactctaagcaaaacatcaatacacacaaaccaccagagagtttaagtatcacttcaccgtcttcttcccgaacataagatttcaagaacctaaggaaatcccctgttctcgtgaatatcagaacagagacagcgccttggaaaatggccgtgaggactgtggctaccatgtgtgaaccgtataatctatcgctcgcggtggcggatgtggaggaggcgaagatcgagcagccggataccgcggttgcgattgtgagagtgtagaggaagataagggagagaccggagagagatgggaagagacggagggagattgtgaggaagatgcaacttgaggctgagcctaagaggatgtagttgcagagaaggaagatgttgtgtgtgttgcctttcgatttcgacattcccattttctcgaattcaagaagagaactttggtttttttttggggttttgatgtttgtttttgtgtttcttgataagttcactttgatttggggtttatatgcatacataagaaacaaagttgaggtaagagaaagtagagattttgttgggattaacggtcgtttttgtttttgaaaatatgaccgttatgacttaaggacgaagacagaataattcaattaaggtgtaacggctcgataactttttaatcttgttttttaattggtttttaatagtatggttttgtaagttttaaggtcaactatgtgaatgtcggatgtcccactgaagacactaatttgtttcataaaatgagatttataaaaattagtttattgggtagacacaattgataagaaattgagtttgctaaatatattatgatgataaataatacactttatttgttaatcagtttattaataaagtccaacacgtaaagggaatatcaattttagaatggtcacattagtttaaatgttaagaatagcgggttaatattctaaaagagttgtagaaaacgccatttgaaattgaaattcaacaatacaaagttttacaaatgtgagatattattgccaatacaaatttcgacaaaaatgtcttgtttcatatgggaacggacacacatcgcatttggtaacggggacatctttaaaaatgtaaatgattatggatataaattgaatattttgtaacatcctcctaatgattttttaaaaatatctttatgtcttataattaaagatctaatatacaatcaaacgtaacaaacagtttttaataacagtaatttgtatataaattaaaaaaaaaaaaactatgctatgacttttaaaaaatggtatatcttgtagtgataaagtaattaaaaacatgttagtcaaataaaaccatttgatgcatgaattttgactaaattcacaaaatttaatttttcaagataaactaccaataaatccttaatattattataaaaatatatactagtcatacttatttcattattttaataaatatacaaatgtaatacacgaactaactaccaaatattaatttaaatcaattttgagatgttttaaaattatttagtataaattaaaactctttttaacacattaaaattcgtggttggacactatatatatccatatccccagaagggattaagttacaagcaaacatataaaaaaccatagctagctacaaagtgaacgtattaagtcgccattacctacaaggctacaaagaagataaaggtatgtaagctttatatgtagatttgttttgataagaatgtaaatatcatttcaagaaatgaatgattcagagattacaaagtaaatcctaaaaaggctaaaaaatatggaagcatacacatttgaggatcaaatcatcactaaatccttaagcggtgaaactttaggcaatgttatgaaattaacttgatatagaagactcccctaaactaaacatggctagaaacaagagcaataagggaaagagagatcttcaaactgactagaaagcgtagtggaagtcccttcacatcaataagctttatatatagtttgggaaaacatttattttgttatgaggattccaattcagattttgttatgaggattcaaacatctatttttttagaggattcgaagcccatttagggattgaaaaatattaaaaattaaattaatagaaaaaaactcagattttaataaatttaatttgactgacacttatatttctcttcaatatataatagatataagatatatatccgatatatcgtacccacacttttctgttatcaaattcatagtgaataataaatcattcacacaatcacatatttccttacaataactaaacaaaaatattcatcaaacactaccatgatccatcacacaccacaataatgatattttcttaaaatttctaaacaaatagatcaattggaaattttcttaagcatcaactatgcaaattgaaattaaaagtataacttaaaatttatgataacaattttaaaagaaaaaatgtgcacatcgttttgttaaagactaatatttaattttaaactagaaatattatcttattatataaatattaaatacctaataatcatattatttttacaagaatatatgaaacaacgatccttgattacttaattcctaagaagataaactatctattttattatgttttgttatcataactcaaaatttatataatagaaaaaagcgcgctcactattttgttaaagactcagattttttgtggttaaatattacatgtatttgtttcccaaaatttacagtcatcaaaatgaatataaatccaagttaagtcaaattgcagttgtaagtctcatatcaaaaaaaaaaaaagaaaaaagagtaacagtctcaaacgtcaaaaacaaattgtgccttgcataaatcaggagttcaaaacaataaacgagaattagtggctttactgtaatgcttaactgacgccattttgagtagcatattttctttaatattaaatacataaatgcagttaaatgtaaatgtctttgttatcctttaaaatggtagtttctaagtcttttatttcatggaaaaaagtccgatgttttcttcatattaaacgctcatttcattaataaagcaagattagcagcaactaaaaaagccaatggtgcatatgagcttgtttctttcgttgggtcaaacagttgtatgtatacacaataaaccatcttttgcttttcggttataatcatcacaacccatttgctaatttttccctcaaatctttcctcaaaatcatctagtatatgatgaagttttaagaatgaattcagtggaaaacactttgtatgtaaaaaagcgtgtgatccacataaatttacatcaatgaccatacttacaaatcaagtttcattttttgcatcattgacctaagtttacaaatatattcataaactaactaaataatatctttcttaaatatatacataatttttggctcactgggcaatacatcaactattaaattctattaaaaaacaaaagaaaacaaaaacaaaaaacaaaaaacaaaaacaagaaaaacaattttttttaaaaacaattcatcctctctaatactctaactaacaaatcctgaaattttgacattcgtagcacaaaaatgttattgttatgagcaagtgacaaaaacatttttagataactcgatattgctctactctttcacaatcatttctaatcatttatacggaattgtaaagagcaaacctataaattaatgattcggtagtgaacaaattggactagttttagcaagagattaaaaaaatgatctaaacattgatgtagagagatgatgagaacaatattcgattttatgattttttttttaattaggtgattatacttctcaccatttttccatgtcaatttgattagtataaataaaataatttcaggaaattagtatattgattaaagatacatacttacattatatattattttttcacatataagaaacacatatatattattttgcatatttattaagtttcaggtatcacatagaaaccagaataatccattgcagtaacttcgaggcacgacatattcctcatgtttgttttcattgcagagttttgtgcaagcagtctcacataatggaagagttgccttttgagaaactttcatgcattgattcgggacacaatgcttaacacatacttccaccgtactcgcgtatgttgaaacaatcatcgttaataaaactacaatcatcaaaacactgtatatcttttttattgtttgagttgccattatttgaagagataaatttatgagtgttcaaagttattaaaattttgcttaggttatatagcaaaaaaaaaatgtaacaagtggattattgttgagttgtttctatagtttttactttatatagcaaaactagttttgactacttaaaattatttattttggaagtatatccgtttgatttttatttttttcataagttagtttttttgtttatgttgttgactgtccaaacaatctatcattccaaattcttgttgtcaagaaacatagaaatatattaatctcgttccaaattcttgttgtttaaaattatatatttttttagattcgctaatgagtttcttaagaatggattatgttgtgaatgttcttgatttaatttggaagaacaaagctcagaatcatttaatcatttcaagaacaaaactcaaaatcacataattgtttagaaggacgaaggacatatattttagcagaggaaataactctaagtctaaatgccttcttaagccaacataatctacgtttggatagaataaataaccggaactataagaccaattttttattgatgtatttcatgtcctttttatatctcaaaataaataatctcaacacaaacaaaaaaaaatcaattacaggccgctctacaattgttctacgttctcaaataacaaaaccaactatcgttcctgcaaaaatgaataaatcagtttttaaattcacaacatttttgtttttttgttgaccaaagccaaacatttttttgtcgaggaaaataataagcccaatatatttttttgtcgacttaagcccaacattttaacgacatctaataatataagcccatttcttctcagtccaagatcataagataagtgttaaataacaaaattagagattctgactaactacagatgtcattgtcatcctagttcctagaggtcatagttttgtataacaaactactctataaagagtataccaaagatattcaatacttattttaaaaatattaatttaatttttttacttatattttttttccaaaaacaattttgaccgtactaaattattatttttttagttccaacccttaatatacatatataacaattttatgtacctatctttctgatgcatttcaatattaaggtctttgttaagtgcaatgtataccaagcaccactcgatcattgtttcaagagtccaaaaatcaattttatccaaatatttgatctaatcatctctctaaagactagaaagaactaatattgttttggtccaaaaatccaaatgttggcaacaacaaactttgaaaaatattttaaagtaatatcgttacggtttctaatacaaatacataatcatatgttattttcttaaatacaacactattcacctaaattctactacaaaaactctacttgagttactggaatggctaatttgaaaggctacttgagcaaccattgagagaataatatttacgtgctggtcaagtctatgaagataaagaatcctaaaaactaagtacgccttactagttaaagactatcattgattaaactcaggatacaataatagtccgagaccaaattgcttttattataaaataaaataaaaattgtttttaattgaaacttaatttagaagaggtccaaggtaacaaaatcaaacatcctctcccattctacgacgcaatgaggatccctctgaagggggctcagccttcaccttatccaagatcctaaacactttaatgtcaatgattctttgagagaatttcttgaactgcatcatattagagagcacaacgaaaacagattattgagcttactaatggagtaaatcagtgtacactatgaaagctaatagaaaagtatcaagaataaagttgtagagaaagttttacaagggaaaagaaaaacatgtgctaacatataagaccaagtattaacatgaataacaataacccacataacgtaccacaaatctcttacgcccctgggatatgctgagcgactttacgaccgggggattagctgaagtcgccatgattaagagagtgtgcaaagttacgcgtttcctaaacaagaaattttgattccaaaagcttacaattaaagtttctacgtgcaaagatagcaattagggtttatcaatctagttacttgtctgagaatcaacataagccttgaaagtgaaacaacaaaagtaaaagcttacgaaaataagtttggttcttaagcttgagctagtatgagcttgggaggaatttgagaatgcggcagatgaatttaagggtttaagctttcttttattgtttctcaattaaagaggcggttaggtttgttctggttttatctgtactctttaaaatcaaccgatattcataaaactaattcattttcttgggccttaaccaaccttagttcaagccgaggcctatacatccttattgtataaaagatttttttgtttcttcttcactttttcggcattaatctctactaagaaaattcataatcataaacaaagagagaaagaaaactagctaattttttttgaatttaatgttaaattatattcaaagaaaaataaactgtttatacatataaatgcaaatattttttttaaaaaatatatcaaatgtgtatcctatctatccttgattttgatcttgccttgaagcaaaccacacttggattcctcttgggtacttctcttcacctctcacccttagcgtgcttaatcgattctttatgtttttgtcgattagcctgattatcttctccgtcctcgatgaaaacggaaaactagctaattacatggaaacggaaatgaaaacggcttttttttataaagaaattatgaaatagagaactaatagggcaagaacaaataaattttgattttatataattgatttgagaagataaagctccaccaacgtttctttttcgacgaaatacgcgcatgaactcttccatcattagattatccatcaacaaattagttaactatcaatgtgattttcccatgcaatttttaatcgaaaactaaaatcattacatagtttttttatttttttttttaagcaatttacctttctcaaatcatcattttccatttgaaatgaatttctctttctacactacaaaatttactagcagtacatatagggtaggctgaattttcagccttatactagttggaatctcaacttttcaccagagtcttttagccacttaaaaaaccatcataaaaaactttaatttcgataaaactacacatactttcggatttgttcttaaaactacgcctccaattgaaccgaccagttaaccgataatttttcatccggtttgacttacccagaatttaaccaaaattaatccgattttgattctattttagcaattttgaccaaaaaaatgtaaataaattgtcttcttaagaagtaaaagtatttttattaatttttatttgtgataaacaattaaaaatattaaattataacttaattttaacaaaacttaatatgacaaaataaaccccaaattatattttgagcctacattttgttataaaattttgataatatacaaacatatacattttccttttgccaatcatttctattttttataaacttaaagctatgtctttttttaaaacaaaatattcatttttcttgcaatcataatatatgaccttagaactttatatatataatgaaattcaaaaaatatgccaaatttatttttatataaatatatctgtaaacaccacaatcaaagtatatattatggtatttataaatcaatttttctttatagattctgttttctttttatatattcaagatgagttatatatatatatatatgtgtgattatgtgttttaaaaaagaaaataacctttgaattattaaatttagagtatataccaaatacatttatataaataacaccattgtatttataaaaagaatttgttgtctattttgttatattattttgcggtatatatttttattataaaagaattttggtaaaattaattaatttagtatttttatcaaaattaaataaatagtattcttcttctagagaatatattttctgggtcaaaattgggttaaaatagagtcaaaatcgaataggttcggttaaattttgggtaattcaaaccgggtgtataattattggttaactggtcggttcaattggaggcgtagttttaacaacaaatccgaaagtacgtgtagttttatcgagattaaagttttttatggtggtttttcaagtgactaaaagtttaggatggaaagttgagattccaactagtagagggttgaaaattcaggcaaccctacatatatcgtatgctctacaaaataaatatagaattgattaataaacaactttagttcccttatatgtatctgaattatcattaagaaagagtttatgtattggcatcaaaagcatctaggaagagtagaaggtatgagttttgacttgtgtgcatgcagtctctggtgctgttggatcggtccaccgtaaaccgagattgttctactagaaagcccgcgatgcttggtctccaatcctagaaaattgaagataattgatcgacaaaccaaagatcctcacatatgaatggaggagtctccccttgaagaaccccattcttacacatcagaaaaggagacttaagaattcgaatcagttcgtccattatctatttaatttcctttctcttgtaattgccgagccaaaagttaaataaaagaaggttagatccatttctctcgtcacttggattttaccaaaatgggtttagggttagattgaacggactgtacaacaattaaacaggttaagtgtttagcgcctaacaatttttttgaaaactgcatttagtatattctattttaaagccaagtatacttaaaattgcttgccaatccacaaaattttattttaagtaaggttttgacatttatttgtaaaacatattttgcacgtttgcaatcaatttgtgaaataaaattttgagttaacgaaaaaccttgcatatagaatatggatcttcgtaagattgtaacaatgataagtaagagtatcatcaaccttttattaacgagtaggagaaagacgacaaacaaaatgtatcttcaacgtgttattttatccacttactaattcaagatggcaatgttatttgtcttatttcttgccatgtaaaacagactgatgtcatcctgtggctgtattatgcagaaaataggatgtgaggaccattacaatcgtaaatctaaccaaaccattataaacatttaaaatgaaaaagtttaaaagctaaacgtgttaagtgtttgaacgagaacaatcgctagagaaacatagtaaaatttggagttgcgagagaagagaagaggatattttatttataaaaatatatatatatatatatatatatatatatatatatatatatatatatatatattatgacaggaaacttttgttgaaaattcgtcaaaatcacagtttggtaggagttcaactttttttttgtttctgtgctgaaattctaggagtggcattttaaccaaaccaaacccaagcttagactttaaccattcggttatgtctcttctcaacccaaatggttcggtttggttaggtttgacaacccaatatatttatttaattaataatattgtatattattaaatatgtaattatttgcacttttttttcatggtttatttgaattattaaactttttgcttaagctaacttatatcaaatttaaagttcaaacgataatgaacaaaataattctgtttcattacattgattagtcttctaaaactaaactaaaaccaaaccaaactaaagtcaaatcaaaccaaactgaaccgaacatagattgacccaaatcaaaccaaactgaaccgaacatagattgacccaaaccctaaccaaaccatatactagatcggctgcggcataaaaagtggtgatgatgttttattctatgatttatacactaaccgatgtcaagttggacttttccctgatgtagaacgagattggattttcagaagaacataaacttcttaactacacatctagcttggttggtataccgtatctctaaattacaatttatttcccttagataataaaattcttaataatttgtaccaatcgtcattgtgacgctggtttatgttttcctacatttgaaggcctccataggcccaatggatttctaattatatatcttcaattgctggtataggtaacaagaagaagaaataagagaaaaaggaatttacatgacctaacttggcgaaacgacaaccacaagcatggcgatgtccaatcttccaagagatttgttggaggaggtactctctagggttccggtaaagtctatagcagcagtgagatccacttgtaaaaattggaactctttaacctacggtcagagcttcacgaagaagctctatggtaaaacaatggcaacaaaggaaaaggagtttctggtggtcatgactatggatttggaggtttatttaatgagggtcaatctccatggaattcataaagatgataacaatgttaaatcatctatcatgcaaaaagctaaactcattaggctaaatgatgatcgagttcgagtcgatgatatatgtaaagtctttcactgcgacggtttattgttatgcatcactattgggatcaggcttgtggtttgtaatccttattgtgggcaaacaaggtgtatcaaaaccagaagagattaccatataaccgacaattacgctcttggacacgagaagatgaagaacagcccacttcgtaactacaaaatcttggtgtttcatgataaatccttcctccaaaattcttggtttgaaatctacaattttaactctgattcatggaaggttttatatttcacttgtgactggaaattaccgttttctcaacttgttgtgtctctcaagggaaatacttactggtttgctcgagagatgtatatacacggaccaagaatagatctccctgatttcttgatttgttttgattttacaacagagagatttggaccgcgtcttcatctgccgtttcactctcgttgtgttgatactgtgactctcgctagtgttagagaagagcagcttgcggtgttatttcaggactcaaaaacgttgatcctagaggtatggataacgactaagattgagcctaatgcggtctcatggagcagcaaggtgttcttagaagtgaatatgagtccactcactggttttcagtttaatcgtagctttgggagtttcttcattgttgaggagaaaaatgtcgttgtggttcctattaaaggagggcatttcaaacgaaacctagcttacatcattggaaaggatgaatacttcaaagaagtggatcttggagtgccaagttcatatatatatttttccccacatgtgtgctcttatgttccaagtttagtacaaatcaagaaagatgcacaagtgatgctgcaacaccataacgtctcagcagaaaagcatcatgagttttgtgcatctttgtgagttatttaagttatagatagagctcttctatggcagtacaataaactgtttccttttgctcatcttctattattaatttgtatgtttaccattgttctcaggtaactcaacatatatattcccgatggatgacgaacaaaaatactttgcgtcatgtgtttggcctttccaccatttcttttctttttcttttttcttttttgaatatcaggaggttctgaaccgaaacccataatttcccaggcgcaaaaccacaacatgtaatattagtttcattccagcgcacccgaatcgacgatctttaatctctaggttctttaccaattgagcaaacgacacttgatccttctatcatttcttgatacagtaaaagggcatcttggaagcttcctttggcatttgctagttagctgagaaactaaaggagtattagaagatcatgttttcgtttcaagtatctgctttatccacaaataaattaaatgcaattagctatacatgccacatctaatcgtttcgggggagtgcatttgttgatatcaattatgatggaggcacatgttcctttgtcgtaatagattagactctggaattgtgacgagaaggctcttttaattatcacaattacaataaataaataggagccatttctattctaaatatatgacacagcacgtttcatggtacgtctttagcttttccaaagagaaatatgttattttcaaaacttgcatcacatcaagagggcatgtaagtaaatgattaatctaacgcaaaatcttttttgttctttcttttgcttagataaaatattaatatcaaatagtccacaaagtggatgatcggaaaagagttttacattgtctgaatcgttacaaaaccaaaggaaaaaattgacaagaaagattgcttggatcaatacaatataggttaaaattaagccggtttggtaaaaggtgttaccaatcaaacccaatatattatgcataacgctgtacatggtaaacaatgactaacaagtgggtcatagccttggtgagcccggaggatgagtgatgaccctttgatggtcttctcctcgaatcgctcggctgcatttgaacttttttttgaaatccaatttgtatcaacccatctttccctcttactgcaattcaaaaacaaatcactaataagaagagttttgctaacactttttagaactatctaaaaatttgattagtaaaagtttgattatggtcttttaaaaaatggtttgttaaggagcatgactccttgaactatccccaacgtaactgcacatatatgattttagaagaaacaaagaatctaagtaaatccaagaatataaacatcaatgaaacaagtataagcctaacatgggtcagccttctatgttagccaagtataacatagaaagtataagcctaacatgggcttatactttctatgttatgttctttaatgggtcagccttatttcctccgcgatccaaacaggctaagaccgcgaggcccacatttttttgggcttccttacatgggcccgaacccgccccgcaacatcccaaaacgggccaggcccgcggataagaggcccgattgacatctctagtttcaaactatctaactacaaattattgtgaaaccaatcaatctatatatacatctatatatacatttttggtagactttttggccaaaaatccctatactatttactattaacattcaggtccttacaaattctatcaaaaccaaatattttatgactaaaaacttacaaatcgttaattttcattaaatagtttaatcaactctttcctaatttttcatccttaattaaatctttctttattgaactatatttgattaaggctaatttcctaaaatctctatatcgatattaaatataaatataaaagaagtcaataaagatatttgttgttatatctaatttattttgactttatatataaaatccatatagttaataaaatatttgatttttcttcatcttatgtaattcatattttttaaaacaggcatataatactcaatcgatgaaaaaataagtgtacaagatcccacattgattaaaaattgggatatcatttagagacatactataaacaagtaccaaaatgaatctgaatatgaatgagcaggaactttgatatatcagacatctaaaattaaaagtgttattcggtttactccgattttttattttaaataattaaaaccttaaaagttttaagatattatatatatttcaactttattaaaagttaagtattacatttaataattttaagattttatgaagttttaaattttgtaaatatttgaactttataagaagtttaaacatttataaatacaaaaaaaaaatatgggacgatatagtacaggtgaaatcctagatgtaaaatcaatatacaattatgaagtttggattgatactaaaacttttttgaagttttcaatattataaatattcgaacttcataagaaaatgacaaaatgatgtttaatttcacgggacgaggttatatggtgggatgggtttggattgatattaatacgggatggtatattatgaatgtatctatagatcatcttaaaaacaaaaatttaattttttatttaataaaagtataggcctattatatacctcttgaatatgttatttgtatataaataatattaatttaaataaaaatctttaattttttaacaaaaatatcaacctgcgagcagcggtgtaccgcaggtcaatctctagataatacaagttttaaatcgttattacccctaaccacaaaagcaaaataatgaattttaatattatgtgtcaatatcatattattcatatacaaataataattcttataaaaaaatgaacatattcatccgaggtgtcccgcgggtcaatatctagttttgctagactttttggccaaaaatccctatactatttactattaacattcaggtccttacaaattctatctcaaccaaatattttatgtataaaaacttacaattcgttaatttgcattaaatacttcaattaactctctcttaaacttttttcttaattaaatctttctttacagaactatattcgattaaggctaatttcctaaaatctcaatatcgatattaaatataaacatagaatttttctgtcactatatttgttcttatatctaatttatttttactttatatataaaatacatatagttaataaaatatatgattttctgcatctgatataattcgaaaacaaataaataacttaaaagtatatttttttaaagtaataaaaattgtccggaagtatatcatagtatcatacataaaaaacaatagcatgtatctataaatcatctttaaaaagaaattcaattttttatttaataaaaatatatgcatgtgatgcacttcttgaatatgttatttatatataaataatactccctctgtttcataatataagttgttttagaccaatttttttgttttacaagaaaagttattttctagtttctatgcaaattatatgttactttaatattttatgattacttatattatttagtctcttttatgattggttgaactttttcaaagtaaatattcttaactgaaacaacttatattgtaaaacggagggagtattaattaaaataaaaatcactaattttctaacaaaaatatcaacctgcggtttaccgcaaatcaatctgtagataatacatgttttaaatatttattacctctaaaaaaccttaaccacaaaaatactgaattttaatattaaactaatatacaacaaatatcagaacataaaacatgaattatccaaactttacatagaaaaaaaatatatgtcaaaaatatatgccgtgaattcgaaacttgtgtttgccaaaacaatcgcacatttgcaatttcgttaaatttctgtcttaaagacataatctttttgatcatttagcttccatagctaccgtagtatctaattccttcccttagattttgatttctctcattttatgtttagcgttaacgcaaacgagttcaaaattttgagttttcggtttcttatttttagatacatgcctcatatttagacttttgctggtatcttgcttgattccttttgcaatttctcttgtttaccttgaaatataattttgtattgattgataatacacttggtgtgagcagtttttgatgggaagggatcaaatggataacattgtggaatctttgcaattagataagagtaagttcttagaggaatcgagaaagatgacattactaagctctttcagccatgtctaaacattttcaaatgtacagtattaaattacattgtagataaaagcgcgctaacagctcctcgataattatattacaaaaaaaaaacgtgcggtttggcgtggtttgccctagaatttttaatgtcttagtactccaatgttttttataaaatttaatgttggattttaagagtgatttttctatgattaatatacatataaactaaattccttaattattatttttgatacaacttaaattgattcatgcacttacccttgctatacagaaacctagaaagaaaatttgaattttggcatttaatcttcacacacattattagactttcgatttaattcaattaaaactcttttttcttacacattaaaatttgtggttggacactatatatatccttttgctttgacgggagttgtgaaagcgacaagcaaatatataaacgaccttatcaacaaagcaaacgtatagctacaaacgattgtgagcttttatatcaaacaatgcaaacatatagatcctcataactaacgtggtacacccatatatataacttatatatttgtaaatctgcttaaaactttacaacttacggcctttatacctttagatacggctatgcaactatacttttactggatttgtaggtttgcatgcaagatttaagtgccataaacctaaagcctaagggtcaatgtaaatataaaacaacctaaatctagatctttatatcactttgctcttttcatgatctctctcttaagtttggttttcccttctttcctttcctctagtgattcaccacctctgtcaccgtggcaagaatgcatagtatgtctgcctatttctgaatgccgcatgcgattttaaccacacaaaataagagggaatcaaaagattttttagaatagtataaatttcattattattttaattgatagactctatggaaacagccatttttctgaagaaaaaaactacggttctagcctcaaaactatcacgttatcttccatgtcaactgtcggttacgcacaatgttattttagtcaaattttaatagatggaaatggtcactatctttgatttattccatatatcatatatgtgtcatttacttaatttggggactggggttaaaacgtggctactacagcaattttatcttaaactaagtaagcagctccttggaaggtaagatagaccgatcaacgtacgattaagtatagggtaaattgcaggccacacccgttgaccatgttttatttccatggattgtcaaagtcaaatgtggttttcaccatttgtcttttcgcctgcaaaatgacgcttctgcccttgcgcttctctcttagcaactgttgaaatgtacggtttagtttagcaggtttagttacgtacactgttccggttcagttgaagattttttgttcacgttgacgcgatcggttccgttacaagtgagattattccgaagtgacatcaacatttaatgcccccaaaaagtttagatgtgactattgtcacaattaatgcaaaatcatcattacatcaaataatattaaaaaaattattaataataattaaaaaaaatttgttgagataaagaagatgaacccaggaacaaagaattattgcgaacgtacattgctgctgaagaagtgttgatcttgtttttgtaccaagtttggagcattgctcgtgtaagtaatgaagttcttttaagaagttttttttatgtcatattaggatcttgattgtgttcgaactccatttttttatcagaatatttgcaaaatctatatctgtttgtttaaaatagtcaaatgataattggtatttaggtttataaatgtgtagtatcgacattccatttgttttttatatgtatagtatttttcagttgcatttaatgtgtgtctcctgaatttatgatgcaggtgggttatggatattcccgtatttaccatggtcggtgagtggaaatgcaaagaaggagaattgaaatttgaacctgaggaaggcatctttggtcgttgtgtacgcgttcaggaaaccatgacgtacacggactttgtccgtacactccgagaggctttcagtttgaagtccaccgagatcaatcccataattagctactggatgccgggtgaaatgtcaatgctgatagatactaaacgccctcctgtatacattgacagtcagatgggtctcgagacgttttttttggttcgtggtgggtatctttctctcaacttgtttgtctctttcaataatacagtgaaggcgttcgggaatactgtctctaggtctcatggtgaagtttctgaaagtgaccgtgtgtttgatagtgctacaaatgttgatgaaaataatgaggatgcagaggagcaagccgatgttgaagacgatacaacagaagaggatgaattggaggagggcaacgaagatgatgatgggtgtgatgattatcttggtgtggatggatctattgggggaagtaccctgtatcctaccacagacggtagtgaaggtattggcgaagaatacgattacaacaagtggaacgatgtaatagtagaagaatacgtacaaggaaatcttgaggaagacgtcagtctcactcaacagactgctcaacatccagggaaattcagtcgtttattggaaacgtgtacgtacacgggtgttagtgtacctggcggagatacaggggaattcagtcgtctcttagaaacgtgtacgtacactggtcttagtgtacctggcgaagaaacaatctctcaattgggttacggtacacgctgcgaagggcaaagggattccaatcttatttgtatagacgaagtcaccggggatgaagtgatcgaaggtattggagcttcctcaactgggacacaaaatgataatggggtagttaccgcagctgaggcttaccaagtgtataatgaatttcctaagttacatggtggcgagttggcgaatctcggtaacgatgctgctcctgtgttcgatgacttactcaattttcgagctgatgagacacaggttgaaatcagcaccacaggcgaaactttgtttgttggaagtgtttttaagaatagaaaagtcctgcaacaaacaatgtctcttcaagcgataaagcaatgcttttgcttcaagcaacctaagtcatgtcctaaaacattgaagatggtgtgcgttgatgagacttgtccatggcaattgactgctcgcgtcgtgaaggattcagaaagtttcaaaatcacttcgtatgctacgacacatacgtgtaacatcgactctcggaagaactacaataaacatgctaattataagctcctcggagaagatgtgaggagcagatacagttctacgcagggtgggccgcgagctgtcgacttaccacaactgctcctaaatgatctgaatgtgcgtatttcatattctaccgcttggagagcaaaagaggttgcagtggaaaatgtacggggggatgagatagcaaattacaggtttttgccgacctatctgtatcttctccaattagctaatccgggtacaataacacacctacactatacaccagaagatgatggtaagcagcgcttcaagtatgtctttgtctctcttggcgcttctatcaaaggtctgatatatatgaggaaggtagttgtggtagatggaacgcagctagtcggaccttacaaaggatgtctccttattgcatgtgcccaagatgggaacttccaaatattcccaatagcttttggtgttgttgatggtgagaccgatgcttcttgggcatggttttttgaaaagttagctgagattgttccagacagtgacgatttaatgattgtctcggacagacattcatctatatacaaaggcctaagtgttgtttacccgagagtgcatcatggagcatgtgctgttcaccttgagcgaaacctctccacctattatggtaagtttggtgtgtctgctttatttttcagcgctgccaaagcttatagggtcagggatttcgagaaatattttgaactgttaagggaaaagagtgctaaatgcgcaaaatacctagaggacataggatttgagcattggacaagagctcactgtagaggagaacgctacaatatcatgtctagcaacaactctgagtccatgaatcatgtgttaacaaaagcaaaaacttatccgattgtttacatgatcgagttcattcgggatgtcctaatgcgatggttcgcatcgaggaggaagaaagttgctaggtgcaaatcttctgtgacacctgaggttgatgagagatttctacaagagttgcctgcgtcaggtaaatacgctgtgaagatgtctggaccgtggagctatcaagtgacaagtaaatccggggagcattttcatgtcgttctggaccagtgtacgtgtacgtgtcttaggtacaccaagttaagaatcccatgtgaacacgctctagcagctgcaatcgagcatggaattgatccgaagtcttgtgtcggatggtggtatggccttcaaacgttttctgattctttccaagaaccaattctacctatcgcggatccgaaagatgttgtcatcccacaacatatagtggatttgatactcattcctccatacagtagacggccaccaggaagaccactgtccaaaaggatcccatctagaggtgaaaaccgggtatgtactaacatcgttcattcatctacttgtattttgagtattaccatgcggagatttgtaacttcctgtctttgtcacttcagaaaaagagacagaaaagacttttaccaaatcagtgctcacgctgtcgacaagcaggtcataacaagaagacgtgcaaaaatccaatctagttccggtgacaagtttctgagccggccaatatagtgtacgcttctgtgttttctcggtgtacgtaagtttatatataatccacctgtaactatgtacgttgtgtacgtacgtttaaactctacgttcgtataactatgaacgtttttgtctgtgtacgtgttaaagttcatgtaataagggtacacagaggtggttgctcaatattttgagtaatttgaaataagttttttgaaaatctaacttattccccctcttaaatgaacggagttggagacatggttgggtatattgtggttgtgttggtatttaatggaaaggacgtaactgttgctgtttattgtcaaatcaacgttatgattaccctatatgacggttaccaggctattaccaaaaatttgaatcaagtgtagttgtaaccgcattaataactgtagccgttccagatttcctctatttaagtctcctcccttccttaattttatccacaatcctcattctaaacccatttcttgtgccggcagttatatcattcacaaaaaaaaatttagtctttcgaatcgcttgttcttgctatccgtgagatggaggggtttcatacggtctcagaattgtgtcctctgatcactgggtggcgaatttatgtctttgtcgtgagggtcttcaagaaggttatatcgcccaacgtcttcgaactcggccttatcctggcagattacgaggttatttccgttaaattattatgtgtttttctcgttcattcgcttaacttatatattaaactctctactatcatgttctgtatgtaaagaataaccgtattgaggccatcgttgatcgtcgccttgctccgttttacgaagaccgattcgttgaaaatgagtggaagacgatcaccaccagttccagatttcgatttcactcccttcgactacattttggataaatctgcttacaagaacgttttagtcggtgaggaggaataactctgacgcttcatttattacatttttgaaaatgtttgtttattatctttgtttctccatcatctagatgtcattggagcgttggttgatgttggcgcattgactacagactattacggtctcaaactgagtttcaagttaaaagatagatagtaagtgttcttttcatttgttttatttacaatgtcactctaaacgctaacagtccttatttctaacgtagcaatgaagtcttggagtgcgaagcccgcaatcaacaggcggagtacttggatggttactttcagagtttgggtaagggaaattttgttgtcgcactcagcttttggcgtctaactgaactgtctaacccgaagcttgagagccatggtgctatttcaaaggtggttgccaatccggacagagaagaagttgcggatatctcgatggtggttttttagctagagggaatgaaccattattctccgttttaatataatataagactacatttcaattaagttttctttcccagttgttgttgttgtttccataagaaccaaattacatttcagtcgttgttgtttcttgtttccgtttaaattttaatctaatttgttgttttatgtacgtgccttgttttattgttcaaatcctctcgcaatgtacgtatagtttctggtgtacgctatcgtgtacgtatattagttttggtgccttcaacatcaaaaactgttagatttatacttatgttgtgtacgcaatttcccaatgtacgataaacgaagtttaatgtactatatagtgtacgtacacgaagacatctagtaatacttaaagtggtaattcattcaaaagccagaaacataaaaaaggacaggcagtttatataaaaggaaattcataagataagataaataaactggaacgattcaaaaaacataattttttaaacgaagcatacacatgtgttgcaaaatatgtgtgcatccgtcataccaaaagactcgagagtagagccgagtagagtagcttagaccttagcagctttgcttctagtagaatatagccatctccctggcgtactagtagaaaaaacaaaccctgcagccatgatggaacgtgcattgccctacgcaactcggcgggtggacaaacctccaagacctttcccagcggcgagcattttcagtgtgaagctggctgatgtgatacatcaccatctctgcaaccacgtggccagcttcaagggtgggtgtcatttcccagaacttttcgctgatagggaggaaatccaagtgattaccggtacacgtaaggaacaaaccggttgcgaagcaatcaaagggatcagataaagcgaccgttgtcatgactgaaaggccctgagctactgtcacgaagttgctcgcttggcgaacaccttcaaggtaaaccgccgggatggatccacgttctacaagcacctcgaagtatggccggaagggagaccccggttggagtaacgacggccacgtcatgaattcatcgattgcaagggtgttgatgtcacaactgtagtctggctgacggggaggtagttgacaagtatgcttatggggtttggcaattggattcctaggtacaactcggttggaagggttagcggaggtaggaaaggcattgtttttcaaacgaggaggtttagacggattcgtgtattcaactaagtgtgtttgtcatgagttttaaagaggagaataaccatcaatgtaagtgggtgggtgacgtggatgtatatttagtgcatcatattagtaacttttatttattagaattgaagaatgaataaacatggaacccaaatgcaacttctcaaatgttattactatatcttcttctttttcttaattattattataacatgtaacgtaagctaaaattttaacagaaataagttgaaaaagttatctattttaaaaataagttaaaacactattttggtatgggaggagttgcaccggcaactcttgaacattgttcctttagcatcggaggaaaaaacggaatgaatggaattttcggtatgcaattatcggcgtccaaaaatgctttgcaacaagccggacttaaattaccaaactttccagtaaaaatggattgagaaatctctgcaatgcattcaggaatatccatcacggatgagaaacatttagttatatcaggtaatccaggaatcagttggaacggaaacggaaaaggaagttgagccggaaactgaggcaattgagcatttacagaaactatgatacatagaaccgctagaagtgaaaacacatttttgatagacataatgagaaattgagtaaaaagtcttagtattgcaacaatatgcttaatgctttgtttgtttttgattgatgaataacaataaaatccttgcttatttatatggattgaaatgtgaaactgtcatattaatttttttaatttaacatctttgaatactttaattaggtatttgattagccgttttataaatttaataaagttgaaactccatgtgtgaaacaagtaacattaactaagaaatattgactactaagagaaaataaaagtaaaacggcttcacataattaatcaatcatcggtttatatctacaaatttaaacaaataaatcgatttataatattttcttcgtgaaattatttgaattaatctaaaggtttggtttgtaaaacttctatacaatgagtttctccatgacttgttaacactaaacttaaaggtgaagagtttctggatagcgggttaaacggttggaaatagcagttcggatcgggcatgaaaagaatgaacataatccaatatatgtgccaaatatctacataaatttgggttttgaaaattgttaactcacgtgatcatgactcgtgtcaaatttattagtgaaatatccacacatatcaaatcaaattttgttatttttagggttttgtgcaaacaaaaaccctctaactcatctattttgcatctttattctccacctccaaaaaatgcataattatcagataaaacctaaaatcatacgcaatataaccccttttcgtcatttttatctacaacaatattttgtaaaatattgatatttaatatgttaaatcgaagccttctcgaaaaaagcttaactcgaccttcaaaattttaaaaatctaatctatgggagtgtaaaaaagtttacaatatacgtataagggtcatattgcgtattattttagacttcataggattaatatgtgtttattagagatatagggtaaaattaaaaaactagatgagttagatgggtgttttgcacaaaaccctatatttttaaaaaacaaaatatagaaacatttcataaccccatcggatatatacacaagtaaaaaaaaatagttcatatatacaaatgttttatttaatatattaaaatattgaacaaattctaataaaaatcatttatatattcacaacagaagtaaaagttccctattttgttttagaaaaatattaatacgtgatataatattttctaattttgtaacttaaatatatctctctttttatttcttaattttatttcatttcatttttttctcaattacagagttcaattcgtttactacaaaattcagtgagaggctttgtttggtgcgtctttttatagatgttgtatgttttccttgttttatttttctttatactctgagaaatctcgtattatatataattagtaaaggcatggtatataaaatgtatataattgaaatattcttttgaaaaataccgattactatttagaatttttatatcatcacaacatttctcacaccagcatatttagacgagtcttatctaataaaattatactctcaaattttgtgttatcacatattttaaagatttatgaaaacaatttgaagttctgttacattataagactaaattcaattatggagtcgatgtttcaagatgttattcataagaattgaagaatgaataaacatggaacccaaatgaaacttctcaaatgttattaatatcttcttctttttttaattattattattacatgtaacgtaagctaaaatttaaaaaaaataagttgaaaaagttatctattttaaaaataagttaaaacactattttggtatgggaggagttgcaccggcaactcttgaacattgttcctttagcatcgaaggaaaaaacggaattaatggaattttcggtatgcaattatcggcgtccacaaatgcttcgcaacaagccggacctaaattaccgaactttcgagtgaaaatggattgagaaatctctgcaatgcatccaggaatatccatcacggatgagaaacattttgttatatcaggtaatacaggaatcagttggaacagaaacggaaaaggaagttgagccggaaactgaggcaattgagcatttacagaaactatgatacatagaaccgctagaagtgaaaacacatttttgatagacataatgaaaaattgagtaaaaagtcttagtatagcaactatatgcttaatgctttgtttgtttttgagtgatgaataacaataaaaattcttgcttatttatatggattgaaatgtgaaactgtcatattaattattttaatttaacatctttgaatattttaattaggtatttgattagccgttttataaatttaataaagttgaaactccatgtgtgaaacacgtaacattaactaagaaatattgactacaaagagaaaataaaagtaaaacggcttcacataattaatcaatcatcggtttatatttctaaatttaaacaaataaatcgatttataatattttcttcgtaaaattatttgaatcctaaaggtttggtttgtaaaacttctatacaatgagggtctccatgacttgttaacactaaatttaaaccagagaagttttgagatagcggattaaccggttggacagagcagttgagatcaggcttgaaaacattgaacataatctaatatatgtgccaaatatttatatctacatatacgtttttgcagccattttgtcaaataaatcatggagttggaaataatttacaatggctgccattggcatttattatttagtgttacaaaatttaaaaagatattaaccaaacaatatctttcctaatttatttctaaaaatctctacacaatctttccgtatatcttcaaaaatacaattccgtgaattttacaccataaaatatgcataaacccaatttatagaaaatatttatattaacattttgcatagcaataaaaatactaatttataataatgaaaatattcacataaaaaatcatataaacatacagaaaaaactatatatatcattatttaagccattgctttatttaaataaaaaaaaacataaaaacttgaaatcatatactttatatgataaatttaaaatctatattagtagtagaaatttaaaatcattcaagaaacggtataacacgggtgagatcttaaaattattgtatttataacaataataatttattttctttgattttataatactaatatttagctaacgagataatatagacaggtttatataggatgacaggttttgatcgatattaatgaagaaaggtatatcaagaatgaaatcttaaaatttacaattaaaatacaattgtacaatcttaaacacaaaaaaccatacaattttaacaaaacgaatataacttgaaatttaaattttttagctataaaaaatagactcacggtatactgcggataaaatattcaaaattttaaaatccacgatacatcgttacttaaaaaatatgtgttttcgtacctatacttcaaaaattgaaacctaaacaatagtaatcatatactaaataatacagagattgatatctacatttgaaaatacaaattaatatatatcttcagttagtctttttaaaaaataacattatatttttgttaaaaatatagcctcgcggtgtaccgcgggttaaactctaataaagttgatttttcaaaattgttaactcacatgatcatgagacgtgccaaatttatgattgttacacatatcaaatcaaattttgttataaaaccctctaacttatctatttttgcatctttattatcgacctccaacaaatgcataataatccaatgaattctaaaataatactcactgtaaccctttttgttcattttttgctaccaaaacattttgtaaatgcattacattatgcgtcgagaatatatcatatatattgggaatgcattacattatgcgtcatgattatgattttgagaacgagagtaggaaaaaatgggacatggaacgggaactacgccgactcctaaatatttttatttcactcaagcgggtttaatgatttttcgactgttttaatccaatttgatagctcacaagtttaatagaaatttaacgaggaccaatccggttgagttggaacacggtccgaccgctggatcattcctaattttaataaaaatgaaccattattatttgaactagattttaacccgcgatacaccgggaacaatttgttttttaaagttattatatataaaagtttacaaattgtatttatctataaaatattttattttatagtttacaaatgttattaagtaacgtcctgccaaacccgtcccgtaaaaaaaacatttattttattaacgttgatcttatttatgatatgtttataaatcattgtctatagattttgtaattttgtagtaattaaatgctatcaaattatatctctgcgctttgatgattataattgaattgttatagtcatggagaaaagcaatatcaaaaatgataattttgtagtaattaaatgatactccctctgtttctaaatatttgtagtttaaggtttttacacacaaattaagaaaacatacaaatttcatttaatttatctatttcctataaatgcatcattaattacaactaatccaaccaataaaaaaatatgagataaaatataattgattaaaaactattaaatacatttaatttttgtatagaaaagtgaaaataacacttatattgaaaaaaataaaaaacctttaaactacacttaattagaaacatagggagtattaaatattttggaagttttattttagtaaataatcgtgtagttaatgtggagagattttgggaagattgttaaatgtcaaatatttaattcgaagattttctttctaattatcaaaaacaaacattaaatttcaatggcagccattgtaaataaatctcgattacaggatttatttcacaaaatgactgcaaaaatgtatatatagtaatgctagtaaaccagaatgaaaccaaaccaaaaacaaaactaaatatccaactggtatgaattcatgttataaatatatatcaaataatttatttataacctacgatgttataaacaggggcggacccacattatagtttgtaggggcagttaccaccagtaatatataactaattaaagtttttagcttaaacaatatagttaaagtagcaaaatggtagagattgcctccactaagtgctgaagatagcaggttcgattcccatttatttacattttgcacccacttaatttcttggcggatattttaacttttaaactcatgtaacatcttccggaataaaattcttgattctactattttccaactaatctacacacaaagtcaattacattaatcacctcgtgctatagcaaggtttagtacctagataaaagttaaaaatgtaaaattagaaacgaagatgtaaataagtaatatctaaggtaacaaatttagatatttggaagttttctgtttttggttttatatacaaacaagatatacgtgctaacgtaatgaacaatcaactagaattatccctaactgggagaagtttaatactttcttgtgtactaccaatttttttttcctttttttttttgaaattcaggaggttctgggtcgaagctcgtaatctccccaggcccgaaaccacatcatgtattattagtttcgtcccaagcatcactcgaaccggcgacctctaagcttcgcctagggtctttaccaattgagttaacaacacttggtcgtgtaccaccaattactctcttgttcccttaagaaccgtatcaaaacaatggaacgctctcttcaacgacaagacgttcatcaacaaccacaagacaacgtatcgattcatcttaacaaccaaattcaagatttattcggtaagcattcatccgaagatagaaatatatgaattaaccttagatattcctggtttagaatcccagatacctaaaaacatggtagattgattgctacgttgcatggagaaaggagctgtggtttggaacccatgcttgagacagagtggatagatcgagcaagatttacaccaaactcaatggaatcctatggcataggatacaacaataaggggagttacaagatcattgctggttgtcgtctgaaggaacatcccacaaagaccttgtggacaatgcatgactttgcctccaatgcttggaaatacctcaagtcagtatctggtagtgtaatagtcaggaaggaaaaacggctgaattgaagtactcaccacaagttgtgtattatttttgatgacaagactgatcccatgtacacctgccctatataaattcaattcctccagggaattctttttcagattttgtcatctaccatgtggaacgatagactatcgtaaggatgctcttgtactcagggtttatgagggggatcaattttcattgttaaatcaatgccatgcaacaaagaagattgaggtctgggtgagcaagtacaagattaataataattgggttgcctgaatttttaaccctatactagttggagtctcaactttccaccataaacttttaaccacttgaaaaaccagcataaacaattttaatctcgataaaactacatgtactttcggatttgttcttaaaactacgtctccaattgaacagaccagttaaccgataattatacatccggtttgacttacccataatttaaccgaaattaatccgattttgactctattttagcctaattttgacccaaacaaaatgtaaataaattatcttattaagaagtaaaattatttttattaatttttatttgtgataaacaattaaaaatattaaattataacttaattttagcaaaaattattatgacaaaatataccccaaattatattttgagctacattttgttataaaattttgataatatacaaacatatacattttccttttggcaatcatttatattttttataaatataaagctatgtctttattttaaacaaaatattcattttcttgaaatcataatatttgacctttgaactttatatatgtaatgaaattcaaaatatatgccaaatttatttttatatatatccgtaaacaccataatcaaagtatatattatggtatttataaattcatttttctttatagattcagttttctttttatatatttcaagatgagttatatatgtatatatatatatatatatatttatatatgattatggtgttttaaaaaagaaaatgacctttgaattattaaatttagagtatataccatatacatttatatatatatatataacaccattgtatttataaaaggaatttattgtctattttgttatattgttttgcggtatattttgtttattaccaaaatatatactaaaattttattatataattttgtgtggtatttttttatttttttattttggtaaaattaatttattttttttaagtttttatcaaaaataaataaaaagtatttttcttctagagaatatattttttgagtctaaattgggttaaaatagagtcgaaatcgaataagttcggttaaattttggttaagtcaaaccggatatataatttttggttaactggtcggttcaattggaggtgtagttttaaaaacaaatctgaaagtacatgtagttttatcgagattaaaattgtttatggtggtttttcaagtggctaaaagtttagggtggaaagttgagactgtcacctaaagttcatgaaactgtcaaatccttacttgccggatttagtagaccgaaaatactctaagccaagttacttcatcgaagataaaagacccgtagtgtgctcttgcgatgaaactggtcgggcttggatctatgttttcagggaaaataagctgaccagtaaaacttagatagataatgtggttgatccttgaccttcgcattctacatttattcccaatttggtacatgttcctcaaggttaaagagaagaactagcagagttaaaactttaattttcttacatttgggcttcttgtttagttgttgagggagctaagtttgatttggattttgcattttggtgctttattcacaaactatcctctttgttggaactagagattgtttttggtaatttttgttttttttgcaacataaattatttattgtttctagaacaaactagagagaattgcattcactctcgtggtcttggctttgttccgataataaaaatatgttagacttcacttgttgttgggtcaaatatgactaagctttggtgatagttttaatttacctagcttgtgtacagaatttaaatacatgatggtatgaagatcaataagtagcaataaatggaaattttctctttttcctagtgaataaatgtaagagttccatattttatactagttaatacttactaaaatgtaaaatttacaaatttcacggatgttttatatgtatgtaaatttttgtgttgataaatgacgatatactatatataaatatatgcccaatggttgaccaagggtttattaatgcttctacaccaagaggtcggggttcgagtctcagctactgcgatttattagcagatttgcagattaatggaggcaagtgtgcaaaagatctacaacgatgtacaattatagccgttcacctaggattctacgcagagaagatattgaaggtgtccatcaagcgcatggagaaggagaatgatgtgtcgtctgccatagatctaataagggtcggaaggaattatccgtggtagaatcgtctatgtaacaattctcataatttgtaataaataataaatctagacggtaaaaaaaaccagaaaaaaaagacgggagaaagaaaacatttgtctgtgtgcaatatgaaatgtatttgaacatttccctcttttaacttggtatatacatattgaaaactcggtactcttgtagccttgccattttcaaatataatagttgcttctgactcagaagttctgagtaatctggacaagtagggaagaagaaacaagcagaagttaccatgccatggagaggaattgagcttcaaaaggttaaccaagagccatgaacgattaagtgttttattgtaaaaagatgaaaaattagttcttatctttaaaacatgcaaaatttagcttgtcattccattgtattcctccaaacacaattacatagcctttagacgatcaattagagccttgtgcatcatatggtcctcattaggaacaacataaaaaaactaaactaaataattaaatcgaaccaaaattcatcaatttaaaactgaattgagtaaactggtttaagaaaaacggcatttttgattgatcaagagagttgatttaggatttagactacatgatctcgatgtaaagggtgcaaactaaacaaaatgatgtcagaatctagcaaaattttacatggtgatttgtggcaaaaatctcgcgaattagttaaatatttaaatcgtaacagagaaatcttcctaacaaattgattaatatttttgtctagttgaataacctccaaaaggaaaaataccgtttgagatagtttaatttagtttcaacgaatacatattagatcttagacaaaacgatctaccggatcaggtaatttaagttggttaaaattgtccaaaaattctctaatgccagacttgatctagtcccaattagtaagaaaatgagtactgaatataaaaaaacaaaaacctcatctggtgatagaaatcgagtgtaacatcatattttttcttacccatttcatcaaaattccacataaaacaggtttgccatttacttattacaccaaaacaaaaaactggttgagagtagaaacaaacttgacttgggacgaaaatactcttaaaagtcaaaacacaaagattcgaaaccaaaacaaaccaaaccaaaccaaactgataaaatcctaactaaaaaaaagcatttactaaacattttaaaataaataaaatttcccggaactaaaaatggagggaaatacgacgttacaataccaacaacaataaaatgacgaatttacccctaaacacaattatatctccattattttctcgattcgcgcatgtttctctcaagtaaataaaataaaaatcccaacaacaaaacattaaaaaccctttctctcttcccactttcacatccatagctaaacccttgaagaagattgtttagtgtgttctcgtctcttcgtttatttcttctccaccgatccaacaatgctactctccggtcaatctccgactctgattcgttaatctccctccgtctctctcgtctgattccttccgtatctctctctgattttggccagagcacgcttgataatcaaaatttctccggtacggttatgtaatccgtttcctgattagggttttgaatttcgtcttcgtattgtttctcgatctgttatgatcgtacgtttttcgtttattgttcgtcagttattttttaattttgattttgattcgttgtgaaattttgactgtaggggtctttatatgactgagatttgagaacattgtgtagaaaagtaaagaaatgttagaaactaacgagcaaaagggttttgatttaaacgtgtgtgcttcaattgaagatttcagtgagtctgacattaaggctgagggtgaaactgatagtttggttgatggtaatgtggagaatgtgattgagattaaggataagaaaaaagtgattgagcgtgagattctcattacgcgtagggttcttcgctcaggctctgtggcaagggatttagtaaacagtgataaacattgtaaggctgtgaaaaggaaaggaaatgttgttagtggtggaagttctgttgatgaggtgaaagaagaagtgaaacaggagtgtgttaagtctttggtacctgaggagattcgtggagatgattttcgaagtgaagtgaaagtggaatctaaggatgatagatcagatgatggaaaagaagagaaagttcaacgtaaaagaggaaggcctcgaaagtttgggatgagcagtcaatctgatgataatgggttaatctcaaattgtaaacttcggacatctttaggtaagaagaaagaactggtaggcgatgataatgttgagaaacttgttggtggaagctgctttaacaaggagaaagcagaagtaaaacttgagcatggggaatatgctgaagataaagagattcttggacttgattttaggagtcaggttaaggttgaaatcaaggatgatgaatgtgggattgttgagctacatgatgaagagttgcaagttaaacgtaaacggggaaggcctagaaaggtgcagatcagcagtcaatctgatgagagtcgccctaacacaaactgtaaacttgcgagaactccagaactaagtagccagtcgagtgttgacagaattagtttgagtcgtctgcgtggtagacccccaaagaccaaggagacctcggttagcctttacattgaaaaaggacctgagtctaatggaaggaggatggtacgtaagcgtggaagacctccaacaccacagaaaaagaggaaatcggggatgacagatgaatcagattggaaagcaaagaagagactgaaactttgtgagagtccgttagagtcacggcacaacaatcctttaattgatgacgaaaggatgattggcgaacaacggagtaagcaaactgaagctggaggacattcgagatcaaagtctaagaaaatgctgagtgacagaatactgcagttacttctaactgctggttggactgttgaatataggcctcgaaatgggagagcttatcaagatgctgtgtatcttaatccagagggaaagactcactggtcagtgactaaggcttatcaagtttataaaaaacaattggaaagcaacccgaatgatcaaaagaactctaccactggttctggttttggcttgctaccagaagaagaccttcatctattagagagaacaattcagaaaaaaaggagcgatacaggtaagcaaaggtcaaaattgaaggacagagatactaatgacatcttggtttcaacaaagggaacaggaaaaataaagagggaagaaaaacatagtagaaagcgttgtactccgtcagctcgtagttctttgaaagatgtggattccaaggaggatgggtacatattatttgaagggaaacgcaccatgctgggttggatgattgattcaaccattgtgccacttaacggaaaagttcagtgcatggactgcaagaagacagacatacttctagaaggaattatcacaaaagagggtattcgatgcaactgctgtgatgaagtgttctctgttctcgatttcgaggttcatgctggcgggaatcgcaaccagccattcaaaagtctgtatttagagggtgggaattctctcttgcagtgcctccatgagtctatgaataaacaaagtgaatcacaacttaaagggtaccattttgtggactttggttcgggggatccaaatgatgacacatgtggtatttgtggggatgggggagatcttatctgctgtgatgggtgcccatcaacattccatcagagctgcttggacataaaagtaagttgctccttacgttgtgaaaattttatgttaaagtgggcttttctgtttcttctagacttaatttctcttcaatctgcagaaattcccttctggtgcctggtattgttacaactgctcatgcaaattttgcgagaaagatgaggctgctaaacatgagacttcaactctaccctccttatcgagttgccgcctatgtgaagagaaatgtatgaactatacactaaagccatcttatctgtaattgcatttatatgtatatgctctgttaaacttcttcaaacggacttctaggctctaagcattaccctcacactcttgcagatcaccaagcatgcatcaaccaagatggcacggtgcctggtgaaaggagtactgattcattttgtggaaagtattgtcaagaggtagccttcctttttcttttttaccttttatcctggcgctttattac

SEQ ID NO: 1482 - DNA, 2808 bp, Arabidopsis thaliana
catccgtattgagaaggagacacatggaattggtggccacataagacacccacgtaatctcacgtgataataacgtcataactatgttattgtgaacaaataaacccaccacacatttcttctctaaaatcaaagctccaaatataaagaagaaagcaatgtgatttatgatatttacgtcttcgtcggagatgtcacgttggagccaagatggaatttgcagtatgatttcttcttccaaaccccaattcaaaaactctgttattgactggcacatctttttttcatcctctttttgatttctctcgtaactcacatgcagatctgctcacatggaaatcttctcttatcaatctccaatgacgaaaaggtacaagaatttttgatttctcaagcaatttaacttcaattatctctttgtcttcttcgtaagaatcatcataacaatgagttttctcattagagatataagaaaccagagtaccatagagcttgttgcagagatcaaccttaccgtcaaaaaccaaaatctcacttcgaccacgatctggaggttcgtcattgacattccattgacgatttgcaagagaaatagaataattgtatttttccttgtacataaatgaaacttcctccttctcgtcaagattgttgatgactagttcatggttaatatgtgattccacttcttgattcccgatgaaatatgcgtctttgacgtcttcatcacaccagagcaaagacatcggaaacgaaatctatgggtttgatattatcaatcggcatgttaactttgacatcatatattaaatccccattggagagggactccgatgtagataaattaatatcaagctttttggcatcaaagtcactatcttcctcttgaatttgatcatgttcatcaggatctgcaacatcagcgtcatcgtccgtgtcgttggggtttattaaaccatcgtcgccttcaacatcgacaacactgtcactgacttccttgacatcgaagagtggttctatagtagataatttatcaccatatatatcattgacggctacctcaagaaaatgctttatgtagatagataactcatcctcattaataccatggacggacttagcaacaaagtccttgtcttgaacgtgaccatctgatcataagcaggcttctccacgaagttgttgacttgaacgtgacaattcttcgtgaaatcatccccaaatcgggctctttgttttaattcttcaaacgattagacaccaaactcgtataatgaggaggtgaaaaagttttgcatagcttctccttaagtttatcccatgatttaataggattcttgccttgtttgttttctgtacttgttgccaccatgatgcggcttgccctcgaaattacttaactacaagcgaaacaaatagatcatccgaaacgttttgaaactcccaaatttcttcaatctccacaagccaatctagtaacgaatcactagagattccaccatggaggttgggaatacgaaacttataattggtctcccatctcatgtttttttaaagacatcggtgaaagagaatcaaaccacgaggaacgagatgaatctgataccaactggtatcagagagtggatgatgtacgtaatgatagatgtgtatgtgtagggttattatgtgtctgtgtggtgataatattaatgatgtaatagatgtatgattagggtttttattatgtgtgagttagatgtgtatgtatatggtgagaggatggatgcaatagatgtatgtgtagggttatattttgtttgtgtgtgttaggtagatggatgtataggatgcaaacatagcgtcaagcgacaaatgataaaaatagctaaccaaccccagtgcaaatgcaaaacgtaaaagctatatagctaaaatgcatcataccacaaccataattatgaaacctaaatcgaaacatttaggcaaaactctagtcgaagcatgcaaaacacacactctagtcgaagaatttaggcaaaactcacacgccagttttagggtttagtcgaaatgtcgaatcacttagacaaaactcataaattagtcaaagcacttatgcatcaaattcaaattgtcgaacgcgcaacacttatgcaaactcacaaaaatggactcacatgttagtcgaagcacttatgcaacactttattctaaactagagccgtccctatgatttacaaggctataagaaaagaacaaaagtaggtcactttatacatgtttattgtaaaaaagaattactttacacgtattcataataatagaaataaggtagagtgacaattctttctaatgttcatttgaaataaagttcaagttatttctaatggaaatttaaacttaaaaaataaaaataaaataaagtagagtgaacctaacattttggaagatttgaatttgagatgtatgagaactaactcatctccgacccgaccacttaaccacaaaacaatttcaaaattatgaagcagcaaaacataattatatgataatcggccgcaagcatgggcttgacccgcttgtgctcacggccggctctggtctaaacacttacgtcacgtttgaacaaacacatagttgagactcttatgcaaactcacatgttagaaacacttatacaagacactttatgcaaactcataaaccctacggtttagagtttagggtttagggatttagggtatagggtatagggtatagggtatatggtatagggatttagggtatggtataggtatatggtttaggatttagggtttttagatc

SEQ ID NO: 1483 - DNA, 39 bp, Arabidopsis thaliana
cacgacgttgtaaaacgactgaggagattgcggtaaagg

SEQ ID NO: 1484 - DNA, 20 bp, Arabidopsis thaliana
gtcactgcaactccatgagg

SEQ ID NO: 1485 - DNA, 39 bp, Arabidopsis thaliana
cacgacgttgtaaaacgaccctttcgctaaatcccaaga

SEQ ID NO: 1486 - DNA, 20 bp, Arabidopsis thaliana
tcctgaccacttctcgatca

SEQ ID NO: 1487 - DNA, 40 bp, Arabidopsis thaliana
cacgacgttgtaaaacgactggatttcttcctctcttcac

SEQ ID NO: 1488 - DNA, 21 bp, Arabidopsis thaliana
atggagaagcttacactgatc

SEQ ID NO: 1489 - DNA, 37 bp, Arabidopsis thaliana
cacgacgttgtaaaacgacaaccaaggcacagaagcg

SEQ ID NO: 1490 - DNA, 18 bp, Arabidopsis thaliana
acccaagtgatcgccacc

SEQ ID NO: 1491 - DNA, 40 bp, Arabidopsis thaliana
cacgacgttgtaaaacgacccttttcacgttgctttttga

SEQ ID NO: 1492 - DNA, 20 bp, Arabidopsis thaliana
ctgcgattggtctcttcctt

SEQ ID NO: 1493 - DNA, 39 bp, Arabidopsis thaliana
cacgacgttgtaaaacgacccccgagacgctctctaaat

SEQ ID NO: 1494 - DNA, 20 bp, Arabidopsis thaliana
gcgaatttgacacccgaata

SEQ ID NO: 1495 - DNA, 39 bp, Arabidopsis thaliana
cacgacgttgtaaaacgacaatacggtcatggtgagcaa

SEQ ID NO: 1496 - DNA, 20 bp, Arabidopsis thaliana
caatgccgcaaataaaaaca

SEQ ID NO: 1497 - DNA, 43 bp, Arabidopsis thaliana
cacgacgttgtaaaacgacgaattcctcgtatcaaatttcctc

SEQ ID NO: 1498 - DNA, 20 bp, Arabidopsis thaliana
cggtccagaacctgagaaag

SEQ ID NO: 1499 - DNA, 39 bp, Arabidopsis thaliana
cacgacgttgtaaaacgacgaaaatggattccggaaggt

SEQ ID NO: 1500 - DNA, 20 bp, Arabidopsis thaliana
gcctcaggttatcaggctca

SEQ ID NO: 1501 - DNA, 41 bp, Arabidopsis thaliana
cacgacgttgtaaaacgacctgatctcacggacaatagtgc

SEQ ID NO: 1502 - DNA, 20 bp, Arabidopsis thaliana
ggctccataaaaagtgcacc

SEQ ID NO: 1503 - DNA, 39 bp, Arabidopsis thaliana
cacgacgttgtaaaacgacgggaaaaacgaagtgacgtg

SEQ ID NO: 1504 - DNA, 22 bp, Arabidopsis thaliana
attgaactgtgttggtttctgg

SEQ ID NO: 1505 - DNA, 40 bp, Arabidopsis thaliana
cacgacgttgtaaaacgacgaaaattgcggttatgacgaa

SEQ ID NO: 1506 - DNA, 20 bp, Arabidopsis thaliana
gatgcccagagttcgaagag

SEQ ID NO: 1507 - DNA, 39 bp, Arabidopsis thaliana
cacgacgttgtaaaacgacggcatgtacgagcaaatgaa

SEQ ID NO: 1508 - DNA, 23 bp, Arabidopsis thaliana
ccgtgcattaaatcaagtttacc

SEQ ID NO: 1509 - DNA, 39 bp, Arabidopsis thaliana
cacgacgttgtaaaacgaccatgcaatttgcatctgagg

SEQ ID NO: 1510 - DNA, 22 bp, Arabidopsis thaliana
ctctgtcactcttttcctctgg

SEQ ID NO: 1511 - DNA, 40 bp, Arabidopsis thaliana
cacgacgttgtaaaacgacagctgcttccttatagcgtcc

SEQ ID NO: 1512 - DNA, 19 bp, Arabidopsis thaliana
catccgaatgccattgttc

SEQ ID NO: 1513 - DNA, 39 bp, Arabidopsis thaliana
cacgacgttgtaaaacgactcgacgaatgaaaacacacc

SEQ ID NO: 1514 - DNA, 20 bp, Arabidopsis thaliana
ttttcccgattcttgtttgc

SEQ ID NO: 1515 - DNA, 41 bp, Arabidopsis thaliana
cacgacgttgtaaaacgaccacctacccatgaatagccact

SEQ ID NO: 1516 - DNA, 20 bp, Arabidopsis thaliana
ggcatcatcgacgttaacaa

SEQ ID NO: 1517 - DNA, 40 bp, Arabidopsis thaliana
cacgacgttgtaaaacgacccctcataatttcctcgccta

SEQ ID NO: 1518 - DNA, 20 bp, Arabidopsis thaliana
gcctctctcgctcaaacact

SEQ ID NO: 1519 - DNA, 39 bp, Arabidopsis thaliana
cacgacgttgtaaaacgacacgagaatgcacaagcttcc

SEQ ID NO: 1520 - DNA, 20 bp, Arabidopsis thaliana
gcgatgaagcatgaagaaga

SEQ ID NO: 1521 - DNA, 39 bp, Arabidopsis thaliana
cacgacgttgtaaaacgacctccaagctccttgttttgg

SEQ ID NO: 1522 - DNA, 20 bp, Arabidopsis thaliana
atagggcccaatggaaaaag

SEQ ID NO: 1523 - DNA, 39 bp, Arabidopsis thaliana
cacgacgttgtaaaacgacggcccactaattgcaaacat

SEQ ID NO: 1524 - DNA, 20 bp, Arabidopsis thaliana
aatgcattgcaagctcacat

SEQ ID NO: 1525 - DNA, 40 bp, Arabidopsis thaliana
cacgacgttgtaaaacgacccacagtggagagtgatttgg

SEQ ID NO: 1526 - DNA, 20 bp, Arabidopsis thaliana
agggacgcttctgggatagt

SEQ ID NO: 1527 - DNA, 39 bp, Arabidopsis thaliana
cacgacgttgtaaaacgactgcgtttaacgaatggcata

SEQ ID NO: 1528 - DNA, 21 bp, Arabidopsis thaliana
tggaaccttcttacgatggac

SEQ ID NO: 1529 - DNA, 37 bp, Arabidopsis thaliana
cacgacgttgtaaaacgactcgtctactgcactgccg

SEQ ID NO: 1530 - DNA, 22 bp, Arabidopsis thaliana
gaggacatgtataggagcctcg

SEQ ID NO: 1531 - DNA, 40 bp, Arabidopsis thaliana
cacgacgttgtaaaacgacgagggcaaatctttatttcgg

SEQ ID NO: 1532 - DNA, 22 bp, Arabidopsis thaliana
tggctttcgtttataaacatcc

SEQ ID NO: 1533 - DNA, 39 bp, Arabidopsis thaliana
cacgacgttgtaaaacgacccgtcgagctttgaattctt

SEQ ID NO: 1534 - DNA, 20 bp, Arabidopsis thaliana
acacagtttccttcccgatg

SEQ ID NO: 1535 - DNA, 39 bp, Arabidopsis thaliana
cacgacgttgtaaaacgactcgctctcaagaaaccttgc

SEQ ID NO: 1536 - DNA, 22 bp, Arabidopsis thaliana
ttgatgaatttggtaggtgcat

SEQ ID NO: 1537 - DNA, 39 bp, Arabidopsis thaliana
cacgacgttgtaaaacgaccccaacagcaacctcaagta

SEQ ID NO: 1538 - DNA, 22 bp, Arabidopsis thaliana
ttcactttccattcatttgacg

SEQ ID NO: 1539 - DNA, 40 bp, Arabidopsis thaliana
cacgacgttgtaaaacgacgaaatccaaatcccagagagg

SEQ ID NO: 1540 - DNA, 21 bp, Arabidopsis thaliana
tctccccactagttttgtgtc

SEQ ID NO: 1541 - DNA, 41 bp, Arabidopsis thaliana
cacgacgttgtaaaacgacggagaaaatgtcactctccacc

SEQ ID NO: 1542 - DNA, 20 bp, Arabidopsis thaliana
aggcatgggagacatttacg

SEQ ID NO: 1543 - DNA, 41 bp, Arabidopsis thaliana
cacgacgttgtaaaacgaccacttgatgttgcgtctaaacc

SEQ ID NO: 1544 - DNA, 24 bp, Arabidopsis thaliana
tcatttgtcaaaataaaagcatgg

SEQ ID NO: 1545 - DNA, 39 bp, Arabidopsis thaliana
cacgacgttgtaaaacgacccaactattgccaagggact

SEQ ID NO: 1546 - DNA, 20 bp, Arabidopsis thaliana
gagagaaatggcaaccgaaa

SEQ ID NO: 1547 - DNA, 39 bp, Arabidopsis thaliana
cacgacgttgtaaaacgaccgaacgttaaacgctttcca

SEQ ID NO: 1548 - DNA, 24 bp, Arabidopsis thaliana
cattgagaaggttttaacacaaaa

SEQ ID NO: 1549 - DNA, 39 bp, Arabidopsis thaliana
cacgacgttgtaaaacgacgcgtctcatatggtcggagt

SEQ ID NO: 1550 - DNA, 23 bp, Arabidopsis thaliana
gccgttaaggattgataaaaagg

SEQ ID NO: 1551 - DNA, 39 bp, Arabidopsis thaliana
cacgacgttgtaaaacgactcaacaacgaccattttcca

SEQ ID NO: 1552 - DNA, 20 bp, Arabidopsis thaliana
tgcaacgggtgattacaaaa

SEQ ID NO: 1553 - DNA, 39 bp, Arabidopsis thaliana
cacgacgttgtaaaacgactcgccatttttcttgactcc

SEQ ID NO: 1554 - DNA, 24 bp, Arabidopsis thaliana
catgtacgatattgttttcccatt

SEQ ID NO: 1555 - DNA, 39 bp, Arabidopsis thaliana
cacgacgttgtaaaacgacccgccgtagttacgaagagt

SEQ ID NO: 1556 - DNA, 25 bp, Arabidopsis thaliana
ttggatgtattaacgtgaacaaaga

SEQ ID NO: 1557 - DNA, 40 bp, Arabidopsis thaliana
cacgacgttgtaaaacgactggatcagcagtgttttgttg

SEQ ID NO: 1558 - DNA, 20 bp, Arabidopsis thaliana
gtagagcgctcgcttagcat

SEQ ID NO: 1559 - DNA, 40 bp, Arabidopsis thaliana
cacgacgttgtaaaacgacgttgatcgcagcttgataagc

SEQ ID NO: 1560 - DNA, 22 bp, Arabidopsis thaliana
tttggagttagacacggatctg

SEQ ID NO: 1561 - DNA, 43 bp, Arabidopsis thaliana
cacgacgttgtaaaacgacggctcaagaaaaactaatttggaa

SEQ ID NO: 1562 - DNA, 20 bp, Arabidopsis thaliana
tcatatcgaggggaccagat

SEQ ID NO: 1563 - DNA, 40 bp, Arabidopsis thaliana
cacgacgttgtaaaacgactggcaacttcattcaatttca

SEQ ID NO: 1564 - DNA, 20 bp, Arabidopsis thaliana
ctggatcgtgtttggtctga

SEQ ID NO: 1565 - DNA, 39 bp, Arabidopsis thaliana
cacgacgttgtaaaacgacgattgcagccaatgtagcaa

SEQ ID NO: 1566 - DNA, 20 bp, Arabidopsis thaliana
agacggtatgtggggctgta

SEQ ID NO: 1567 - DNA, 43 bp, Arabidopsis thaliana
cacgacgttgtaaaacgacgcaccctcaatagtgtatcttagc

SEQ ID NO: 1568 - DNA, 20 bp, Arabidopsis thaliana
atttcctgccagctgtgact

SEQ ID NO: 1569 - DNA, 38 bp, Arabidopsis thaliana
cacgacgttgtaaaacgacgcattactccggtgtcgtc

SEQ ID NO: 1570 - DNA, 20 bp, Arabidopsis thaliana
gaatctcaatatgtgtcaac

SEQ ID NO: 1571 - DNA, 41 bp, Arabidopsis thaliana
cacgacgttgtaaaacgacgttatggagtttctagggcacg

SEQ ID NO: 1572 - DNA, 20 bp, Arabidopsis thaliana
tgccccattttgttcttctc

SEQ ID NO: 1573 - DNA, 39 bp, Arabidopsis thaliana
cacgacgttgtaaaacgacaggagagtttaacggcagca

SEQ ID NO: 1574 - DNA, 20 bp, Arabidopsis thaliana
tttgctacaccgtccctttc

SEQ ID NO: 1575 - DNA, 40 bp, Arabidopsis thaliana
cacgacgttgtaaaacgaccctcaacttcttcaccattgc

SEQ ID NO: 1576 - DNA, 20 bp, Arabidopsis thaliana
gttgtcactgcttccctggt

SEQ ID NO: 1577 - DNA, 40 bp, Arabidopsis thaliana
cacgacgttgtaaaacgaccacagtggaagcagttcccta

SEQ ID NO: 1578 - DNA, 20 bp, Arabidopsis thaliana
gcatagcagcgtttcgacag

SEQ ID NO: 1579 - DNA, 40 bp, Arabidopsis thaliana
cacgacgttgtaaaacgacgcgaaaaaacaaaaaaatcca

SEQ ID NO: 1580 - DNA, 21 bp, Arabidopsis thaliana
cgacgaatcgacagaattagg

SEQ ID NO: 1581 - DNA, 39 bp, Arabidopsis thaliana
cacgacgttgtaaaacgacgagcaaacggtggcaataat

SEQ ID NO: 1582 - DNA, 20 bp, Arabidopsis thaliana
ggtggttttgtccaagctgt

SEQ ID NO: 1583 - DNA, 19 bp, Artificial sequence
  Common M13 phage bases
cagcacgttgtaaaacgac

SEQ ID NO: 1584 - DNA, 19 bp, Artificial sequence
  Common M13 phage bases
tgtaaaacgacggccagtt

SEQ ID NO: 1585 - DNA, 18 bp, Artificial sequence
  Common M13 phage bases
caggaaacagctatgacc
